(19) United States
(12) Patent Application Publication
(10) Pub. No.: US 2020/0371099 A1
(43) Pub. Date: Nov. 26, 2020

(54) Triage biomarkers and uses therefor

(71) Applicant: ImmuneXpress Pty Ltd, Boonah (AU)

(72) Inventors: Richard Bruce BRANDON, Boonah (AU); Brian Andrew FOX, Seattle, WA (US); Leo Charles MCHUGH, Seattle, WA (US); Dayle Lorand SAMPSON, Seattle, WA (US)

(21) Appl. No.: 16/065,752

(22) PCT Filed: Dec. 22, 2016
(86) PCT No.: PCT/AU2016/051269

§ 371 Date: Jun. 22, 2018

(30) Foreign Application Priority Data
Dec. 24, 2015 (AU) 2015905392

(51) Int. Cl. G01N 33/569; C12Q 1/6883

(52) U.S. Cl. CPC G01N 33/56911; C12Q 2600/158; G01N 2800/26; C12Q 1/6883

(57) ABSTRACT

Disclosed are methods, apparatus, kits and compositions for determining the absence of a systemic bacterial infection (sepsis) in patients, particularly ones presenting to hospital emergency departments (ED) as outpatients, by measurement of the host immune response using peripheral blood. The are methods, apparatus, kits and compositions can be used in mammals for diagnosing, making treatment decisions, determining the next procedure or diagnostic test, or management of patients suspected of having an infection, including those presenting with fever or other signs of systemic inflammation. More particularly, peripheral blood RNA and protein biomarkers are disclosed that are useful for distinguishing between the host immune response to bacteria compared to the host immune response to other causes of systemic inflammation including trauma, burns, autoimmune disease, asthma, anaphylaxis, arthritis, obesity and viral infections. As such, the biomarkers are useful for distinguishing bacterial-associated systemic inflammatory response syndrome from non-bacterial systemic inflammation to provide clinicians with strong negative predictive value (>95%) so that sepsis can be excluded as a diagnosis in patients presenting to ED with clinical signs of systemic inflammation.

### FIELD OF THE INVENTION

[0001] This application claims priority to Australian Provisional Application No. 2015905392 entitled “Triage biomarkers and uses therefor” filed 24 Dec. 2015, the contents of which are incorporated herein by reference in their entirety.

[0002] This invention relates generally to methods, apparatus, kits and compositions for determining the absence of a systemic bacterial infection (sepsis) in patients, particularly ones presenting to hospital emergency departments (ED) as outpatients, by measurement of the host immune response using peripheral blood. The invention can be used in mammals for diagnosing, making treatment decisions, determining the next procedure or diagnostic test, or management of patients suspected of having an infection, including those presenting with fever or other signs of systemic inflammation. More particularly, the present invention relates to peripheral blood RNA and protein biomarkers that are useful for distinguishing between the host immune response to bacteria compared to the host immune response to other causes of systemic inflammation including trauma, burns, autoimmune disease, asthma, anaphylaxis, arthritis, obesity and viral infections. As such, the biomarkers are useful for distinguishing bacterial-associated systemic inflammatory response syndrome from non-bacterial systemic inflammation to provide clinicians with strong negative predictive value (>95%) so that sepsis can be excluded as a diagnosis in patients presenting to ED with clinical signs of systemic inflammation.

### BACKGROUND OF THE INVENTION

[0003] In 2010, there were over 129 million visits in the USA to emergency departments (ED). The most common principal reasons for ED visits in the USA in 2010 (all ages and in order) included; stomach and abdominal pain and spasms, chest pain, fever, headache, back symptoms, shortness of breath, cough, pain (non-specific), vomiting, and throat symptoms. The two most common principal reasons for ED visits in the USA for children under the age of 15 are fever and cough. However, the two most common primary diagnoses (as determined by a physician and by major disease category) are “injury and poisoning” and “ill-defined conditions” (Niska, R., Bhuiya, F., & Xu, J. (2010). National hospital ambulatory medical care survey: 2007 emergency department summary. Natl Health Stat Report, 26(26), 1-31). Thus, patients presenting to ED are very heterogenous and often ill-defined with respect to principal reason for presenting and primary diagnosis respectively. In a setting with limited resources and time such patients need to be triaged efficiently. That is, a clinician needs to decide on one or more of the following actions 1) admit the patient 2) observe the patient for a prescribed time period 3) send the patient home 4) take appropriate samples for diagnostic testing 5) determine the next procedure (e.g. X-ray, scan) 6) administer appropriate treatment(s). Underlying each patient's symptoms and presenting clinical signs are etiologies. It is the ED clinician's job to determine an etiology in each case and decide on an appropriate course of action to ensure the best outcomes for the patient. In many instances determining an etiology and course of action is comparatively easy—for example, an adult with a sprained ankle can be sent home after appropriate treatment and advice, a child with severe burns can be admitted immediately, an adult 70-year old male with chest pain can undergo appropriate blood tests and treatments under observation, and a trauma patient in shock can be admitted to intensive care in preparation for surgery. In other instances determining an etiology and course of action is more challenging—for example, in children or adults presenting with fever of unknown origin, or clinical signs that may indicate the presence of an infection, it can be difficult to decide on the next course of action, especially given that some patients presenting with mild clinical signs can deteriorate rapidly. Clinical signs of infection are well known and described in the literature (Bone, R., Balk, R., Cerra, F., Dellinger, R., Fein, A., Knaus, W., et al. (1992). Definitions for sepsis and organ failure and guidelines for the use of innovative therapies in sepsis. The ACCP/SCCM Consensus Conference Committee. American College of Chest Physicians/Society of Critical Care Medicine. Chest, 101(6), 1644-1655). However, identifying, managing and triaging patients with clinical signs of infection is challenging because of the medical risk of such patients progressing to sepsis, severe sepsis and septic shock (Brown, T., Ghelani-Allen, A., Yeung, D., & Nguyen, H. B. (2014). Comparative effectiveness of physician diagnosis and guideline definitions in identifying sepsis patients in the emergency department. Journal of Critical Care; Glickman, S. W., Cairns, C. B., Otero, R. M., Woods, C. W., Tsalik, E. L., Langley, R. J., et al. (2010). Disease Progression in Hemodynamically Stable Patients Presenting to the Emergency Department With Sepsis. Academic Emergency Medicine, 17(4), 383-390; Dellinger, R. P. et al. Surviving Sepsis Campaign: international guidelines for management of severe sepsis and septic shock: 2008. in Crit. Care Med. 36, 296-327 (2008)). Thus, missing a diagnosis of sepsis in patients presenting to ED carries both medical (patient) and professional (clinician) risk. With respect to correctly diagnosing sepsis, blood culture has unacceptably low negative predictive value (NPV), or unacceptably high false negative levels. Further, diagnosis based on clinical signs alone has unacceptably low positive predictive value (PPV), or unacceptably high false positive levels. In the latter instance the consequence is that many patients are unnecessarily prescribed antibiotics because of 1) the clinical risk of misdiagnosing sepsis, 2) the lack of a gold standard diagnostic test, and 3) the fact that blood culture results take too long to provide results that are clinically actionable (Braykov, N. P., Morgan, D. J., Schweizer, M. L., Uslan, D. Z., Kelesidis, T., Weisenberg, S. A., et al. (2014). Assessment of empirical antibiotic therapy optimisation in six hospitals: an observational cohort study. The Lancet Infectious Diseases, 14(12), 1220-1227). Further, diagnosis of a viral infection is often done based on presenting clinical signs only. The reasons for this are; most viral infections are not life-threatening, there are few therapeutic interventions available, many viral infections cause the same clinical signs, and most diagnostic assays take too long and are too expensive. The consequence is that many virus-infected patients are unnecessarily prescribed antibiotics because of the clinical risk of misdiagnosing bacterial associated systemic inflammatory response syndrome (BaSIRS) or sepsis.

[0004] Therefore, in ED patients, what is needed is an assay that can distinguish patients with sepsis from those without an infection but presenting with clinical signs similar to sepsis. Such an assay needs to have high negative predictive value (that is, exclude sepsis as a diagnosis) so that a clinician can confidently either observe, or send the patient home, and/or not prescribe antibiotics. An assay with high negative predictive value for sepsis therefore provides safety for patients, surety and peace of mind for clinicians, reduced costs of care for hospitals and health care systems, reduced antibiotic use, and potentially reduced development of antibiotic resistance.

[0005] Whilst the sensitivity and specificity of an assay are independent of prevalence, negative and positive predictive value are not (Lalkhen, A. G., & McCluskey, A. (2008). Clinical tests: sensitivity and specificity. Continuing Education in Anaesthesia, Critical Care & Pain, 8(6), 221-223). In the case of diagnosing BaSIRS in the ED it is important that an assay has a low false negative rate, or is sensitive, or will not miss any cases that actually do have BaSIRS. As disease prevalence decreases in a population the negative predictive value of a sensitive assay increases. Thus, in a population with low disease prevalence an assay with high sensitivity will have high negative predictive value. The prevalence of severe sepsis in adults and children in ED patients is relatively low (6.4% and 0.34% respectively) (Rezende, E., Silva Junior, J. M., Isola, A. M., Campos, E. V., Amendola, C. P., & Almeida, S. L. (2008). Epidemiology of severe sepsis in the emergency department and difficulties in the initial assistance. Clinics, 63(4), 457-464; Singhal, S., Allen, M. W., McAnnally, J.-R., Smith, K. S., Donnelly, J. P., & Wang, H. E. (2013). National estimates of emergency department visits for pediatric severe sepsis in the United States. PeerJ, 1(Suppl 1), e79-12). The prevalence of “infection” as a primary diagnosis in ED patients is also relatively low at approximately 10% for children and 5% for adults (Niska, R., Bhuiya, F., & Xu, J. (2010). National hospital ambulatory medical care survey: 2007 emergency department summary. Natl Health Stat Report, 26(26), 1-31). Similarly, the prevalence of suspected systemic infection, as determined by the percent of patients presenting to emergency that had a blood culture taken, is also low and estimated to be 4% (Niska et al., 2010). Thus, the prevalence of BaSIRS in adult patients presenting to ER in the USA is estimated to be between 4 and 10%.

[0006] In patients suspected of having a BaSIRS a clinical diagnosis and treatment regimen is provided by the physician(s) at the time the patient presents and often in the absence of any results from diagnostic tests. This is done in the interests of rapid treatment and positive patient outcomes. However, such an approach leads to over-prescribing of antibiotics irrespective of whether the patient has a microbial infection or not. Clinician diagnosis (diagnosis by the clinician without the aid of other diagnostic tests) of BaSIRS is reasonably reliable (0.88) in children but only with respect to differentiating between patients ultimately shown to be blood culture positive and those that were judged to be unlikely to have an infection at the time antibiotics were administered (Fischer, J. E. et al. Quantifying uncertainty: physicians' estimates of infection in critically ill neonates and children. Clin. Infect. Dis. 38, 1383-1390 (2004)). In Fischer et al. (2004), 54% of critically ill children were put on antibiotics during their hospital stay, of which only 14% and 16% had proven systemic bacterial infection or localized infection respectively. In this study, 53% of antibiotic treatment courses for critically ill children were for those that had an unlikely infection and 38% were antibiotic treatment courses for critically ill children as a rule-out treatment episode. Clearly, pediatric physicians err on the side of caution with respect to treating critically ill patients by placing all patients suspected of an infection on antibiotics—38% of all antibiotics used in critically ill children are used on the basis of ruling out BaSIRS, that is, are used as a precaution. Antibiotics are also widely prescribed and overused in adult patients as reported in Braykov et al., 2014 (Braykov, N. P., Morgan, D. J., Schweizer, M. L., Uslan, D. Z., Kelesidis, T., Weisenberg, S. A., et al. (2014). Assessment of empirical antibiotic therapy optimisation in six hospitals: an observational cohort study. The Lancet Infectious Diseases, 14(12), 1220-1227). In this study, across six US hospitals over four days in 2009 and 2010, 60% of all patients admitted received antibiotics. Of those patients prescribed antibiotics 30% were afebrile and had a normal white blood cell count and were therefore prescribed antibiotics as a precaution. Independent surveys of clinicians, conducted by the current patent authors, their colleagues and associates, have revealed that for a clinician to withhold antibiotics from a patient a diagnostic assay for sepsis would need to have a negative predictive value of at least 95%. As such, an assay that can accurately diagnose patients without BaSIRS with negative predictive value greater than 95% would be clinically useful and may lead to more appropriate use of antibiotics.

[0007] Testing for the presence of bacteria requires that clinical samples be taken from patients. Examples of clinical samples include; blood, plasma, serum, cerebrospinal fluid (CSF), stool, urine, tissue, pus, saliva, semen, skin, other body fluids. Examples of clinical sampling methods include; venipuncture, biopsy, scrapings, aspirate, lavage, collection of body fluids and stools into sterile containers. Most clinical sampling methods are invasive (physically or on privacy), or painful, or laborious, or require multiple samplings over time, or, in some instances, dangerous (e.g. large CSF volumes in neonates). In some instances multiple samples from multiple sites may need to be taken to increase the likelihood of isolating bacteria. The taking of blood via venipuncture is perhaps the least invasive method of clinical sampling and host immune response markers circulate in peripheral blood in response to both systemic and localized infection. Therefore, what is needed is a diagnostic assay, based on the use of a peripheral blood sample, with high negative predictive value for BaSIRS in an heterogenous ED patient population.

[0008] The purported “gold standard” of diagnosis for microbial infection is culture (growth of an organism and partial or complete identification by staining or biochemical or serological assays). Thus, confirmation of a diagnosis of BaSIRS requires isolation and identification of live microbes from blood or tissue or body fluid samples using culture, but this technique has its limitations (Thierry Calandra and Jonathan Cohen, “The International Sepsis Forum Consensus Conference on Definitions of Infection in the Intensive Care Unit,” Critical Care Medicine 33, no. 7 (July 2005): 1538-1548; R Phillip Dellinger et al., “Surviving Sepsis Campaign: International Guidelines for Management of Severe Sepsis and Septic Shock: 2008.,” vol. 36, 2008, 296-327, doi:10.1097/01.CCM.0000298158.12101.41). Microbial culture usually takes a number of days to obtain a positive result and over five days (up to a month) to confirm a negative result—hence blood culture has little to no negative predictive value in an ED setting. A positive result confirms bacteremia if the sample used was whole blood. However, blood culture is insufficiently reliable with respect to sensitivity, specificity and predictive value, failing to detect a clinically determined ‘bacterial’ cause of fever in 60-80% of patients with suspected primary or secondary bloodstream infection, and in many instances the organism grown is a contaminant (Müller, B., Schuetz, P. & Trampuz, A. Circulating biomarkers as surrogates for bloodstream infections. International Journal of Antimicrobial Agents 30, 16-23 (2007); Jean-Louis Vincent et al., “Sepsis in European Intensive Care Units: Results of the SOAP Study*,” Critical Care Medicine 34, no. 2 (February 2006): 344-353, doi:10.1097/01.CCM.0000194725.48928.3A; Brigitte Lamy et al., “What Is the Relevance of Obtaining Multiple Blood Samples for Culture? A Comprehensive Model to Optimize the Strategy for Diagnosing Bacteremia”, Clinical Infectious Diseases: an Official Publication of the Infectious Diseases Society of America 35, no. 7 (Oct. 1, 2002): 842-850, doi:10.1086/342383; M D Aronson and D H Bor, “Blood Cultures.,” Annals of Internal Medicine 106, no. 2 (February 1987): 246-253); Bates, D. W., Goldman, L. & Lee, T. H. Contaminant blood cultures and resource utilization. The true consequences of false-positive results. JAMA 265, 365-369 (1991)).

[0009] In an attempt to overcome the turnaround time limitations of blood culture molecular nucleic acid-based tests have been developed to detect the major sepsis-causing microbial pathogens in whole blood from patients with suspected sepsis (e.g., SeptiFast® from Roche, Iridica® from Abbott, Sepsis Panel from Biofire (Biomerieux), Prove-it® Sepsis from Mobidiag, SepsiTest from Molzym Molecular Diagnostics). Whilst sensitive and specific, such assays also have limitations, especially with respect to clinical interpretation of assay results for suspected sepsis patients that are 1) PCR or assay positive and blood culture negative, and 2) PCR or assay negative (Bauer M, Reinhart K (2010) Molecular diagnostics of sepsis—Where are we today? International Journal of Medical Microbiology 300: 411-413; Ljungström, L., Enroth, H., Claesson, B. E., Ovemyr, I., Karlsson, J., Fröberg, B., et al. (2015). Clinical evaluation of commercial nucleic acid amplification tests in patients with suspected sepsis. BMC Infectious Diseases, 15(1), 199; Avolio, M., Diamante, P., Modolo, M. L., De Rosa, R., Stano, P., & Camporese, A. (2014). Direct Molecular Detection of Pathogens in Blood as Specific Rule-In Diagnostic Biomarker in Patients With Presumed Sepsis. Shock, 42(2), 86-92).

[0010] Alternative diagnostic approaches to BaSIRS have been investigated including determination of host response using biomarkers (Michael Bauer and Konrad Reinhart, “Molecular Diagnostics of Sepsis—Where Are We Today?” International Journal of Medical Microbiology 300, no. 6 (Aug. 1, 2010): 411-413, doi:10.1016/j.ijmm.2010.04.006; John C Marshall and Konrad Reinhart, “Biomarkers of Sepsis,” Critical Care Medicine 37, no. 7 (July 2009): 2290-2298, doi:10.1097/CCM.0b013e3181a02afc). A systematic literature search identified nearly 180 molecules as potential biomarkers of sepsis of which 20% have been assessed in appropriately designed sepsis studies including C-reactive protein (CRP), procalcitonin (PCT), and IL6 (Reinhart, K., Bauer, M., Riedemann, N. C. & Hartog, C. S. New Approaches to Sepsis: Molecular Diagnostics and Biomarkers. Clinical Microbiology Reviews 25, 609-634 (2012)). PCT is perhaps the best studied of these biomarkers (Wacker, C., Prkno, A., Brunkhorst, F. M., & Schlattmann, P. (2013). Procalcitonin as a diagnostic marker for sepsis: a systematic review and meta-analysis. The Lancet Infectious Diseases, 13(5), 426-435) but it also has its limitations with respect to determining the presence of BaSIRS and it is generally considered that PCT is a marker of systemic inflammation rather than a specific marker for BaSIRS (Hoenigl, M., Raggam, R. B., Wagner, J., Prueller, F., Grisold, A. J., Leitner, E., et al. (2014). Procalcitonin fails to predict bacteremia in SIRS patients: a cohort study. International Journal of Clinical Practice, 68(10), 1278-1281). A combination of biomarkers has been researched to gain better diagnostic performance in sepsis (Gibot, S., Bene, M. C., Noel, R., Massin, F., Guy, J., Cravoisy, A., et al. (2012). Combination biomarkers to diagnose sepsis in the critically ill patient. American Journal of Respiratory and Critical Care Medicine, 186(1), 65-71) as has the use of a single biomarker (PCT) on multiple days through the determination of a PCT ratio to rule out soft necrotizing tissue infections (Friederichs, J., Hutter, M., Hierholzer, C., Novotny, A., Friess, H., Buhren, V., & Hungerer, S. (2013). Procalcitonin ratio as a predictor of successful surgical treatment of severe necrotizing soft tissue infections. American Journal of Surgery, 206(3), 368-373).

[0011] Because of a current lack of suitable diagnostic tools that clinicians can use to diagnose BaSIRS in the ED they rely largely on clinical judgment, the presence or absence of pathognomonic clinical signs, clinical algorithms and standard international definitions. However, it has been shown that such an approach lacks discriminative ability such that patients with BaSIRS are missed or patients with non-bacterial SIRS are unnecessarily prescribed antibiotics (Gille-Johnson, P., Hansson, K. E., & Gardlund, B. (2013). Severe sepsis and systemic inflammatory response syndrome in emergency department patients with suspected severe infection. Scandinavian Journal of Infectious Diseases, 45(3), 186-193; Brown, T., Ghelani-Allen, A., Yeung, D., & Nguyen, H. B. (2014). Comparative effectiveness of physician diagnosis and guideline definitions in identifying sepsis patients in the emergency department. Journal of Critical Care; Craig, J. C., Williams, G. J., Jones, M., Codarini, M., Macaskill, P., Hayen, A., et al. (2010). The accuracy of clinical symptoms and signs for the diagnosis of serious bacterial infection in young febrile children: prospective cohort study of 15,781 febrile illnesses. BMJ (Clinical Research Ed.), 340, c1594).

[0012] Whilst there is a reasonable body of knowledge describing biomarkers capable of determining the presence of sepsis, or predicting likelihood of mortality in patients at risk of sepsis, the literature is silent on identifying biomarkers that have high negative predictive value for a systemic host response to infection in an heterogenous patient population with a low to medium prevalence of systemic inflammation. Biomarkers with high negative predictive value would have clinical utility in that they provide clinicians with the confidence to send patients home, or withhold antibiotics, despite the presence of clinical signs of systemic inflammation.

### SUMMARY OF THE INVENTION

[0013] The present invention arises from the discovery that certain host response peripheral blood expression products, including RNA transcripts, are specifically and differentially expressed in patients presenting to emergency departments with systemic inflammation associated with bacterial infection. Surprisingly these expression products have high negative predictive value and, as such, are useful in excluding a bacterial infection as the cause of the presenting clinical signs associated with systemic inflammation (e.g., fever, increased heart rate, increased respiratory rate, increased white blood cell count).

[0014] Based on this determination, the present inventors have developed various methods, apparatus, compositions, and kits, which take advantage of these differentially expressed biomarkers (which are referred to herein as ‘rule out’ (RO) BaSIRS biomarkers, including ratios thereof (derived RO BaSIRS biomarkers), to exclude the presence of BaSIRS in subjects presenting to emergency departments with fever or clinical signs of systemic inflammation. In certain embodiments, these methods, apparatus, compositions, and kits represent a significant advance over prior art processes and products, which have not been able to distinguish BaSIRS from other etiologies of systemic inflammation, including viruses, trauma, autoimmune disease, allergy and cancer.

[0015] Accordingly, in one aspect, the present invention provides methods for determining an indicator used in assessing a likelihood of a subject presenting to emergency having an absence of BaSIRS. These methods generally comprise, consist or consist essentially of: (1) determining biomarker values that are measured or derived for at least two (e.g., 2, 3, 4, 5, 6, 7, 8, 9, 10, or more) corresponding RO BaSIRS biomarkers in a sample taken from the subject and that is at least partially indicative of the levels of the RO BaSIRS biomarkers in the sample; and (2) determining the indicator using the biomarker values. Suitably, the methods further comprise ruling out the likelihood of BaSIRS for the subject or not, based on the indicator.

[0016] Thus, in a related aspect, the present invention provides methods for ruling out the likelihood of BaSIRS (i.e., for diagnosing the absence of BaSIRS), or not, for a subject presenting to emergency having an absence of BaSIRS. These methods generally comprise, consist or consist essentially of: (1) determining biomarker values that are measured or derived for at least two (e.g., 2, 3, 4, 5, 6, 7, 8, 9, 10, or more) corresponding RO BaSIRS biomarkers in a sample taken from the subject and that is at least partially indicative of the levels of the RO BaSIRS biomarkers in the sample; (2) determining the indicator using the biomarker values; and (3) ruling out the likelihood of BaSIRS for the subject or not, based on the indicator.

[0017] The subject typically has at least one clinical sign of systemic inflammatory response syndrome (SIRS). The at least two RO BaSIRS biomarkers are suitably not biomarkers of at least one other SIRS condition (e.g., 1, 2, 3, 4 or 5 other SIRS conditions) selected from the group consisting of: autoimmune disease associated SIRS (ADaSIRS), cancer associated SIRS (CANaSIRS), trauma associated SIRS (TRAUMaSIRS), anaphylaxis associated SIRS (ANAPHYLaSIRS), schizophrenia associated SIRS (SCHIZaSIRS) and virus associated SIRS (VaSIRS). The sample is suitably a biological sample, representative examples of which include blood samples including peripheral blood samples, and leukocyte samples. The at least two RO BaSIRS biomarkers and their corresponding biomarkers values on which an indicator is determined that is indicative of the likelihood of the absence of BaSIRS, and on which the likelihood of BaSIRS is ruled out, or not, define a RO BaSIRS biomarker profile.

[0018] In specific embodiments, the at least two RO BaSIRS biomarkers are expression products of a gene selected from the group consisting of: ADAM19, ADD1, ADGRE1, AIF1, AKAP7, AKT1, AKTIP, ALDOA, AMD1, ARL2BP, ATG9A, ATP13A3, ATP6V0A1, ATP8B4, BRD7, BTG2, C21orf59, C6orf48, CCND2, CD44, CD59, CDC14A, CERK, CHPT1, CLEC4E, CLU, CNBP, COMMD4, COQ10B, COX5B, CPVL, CTDSP2, CTSA, CTSC, CTSH, CYBB, CYP20A1, DERA, DHX16, DIAPH2, DLST, EIF4A2, EIF4E2, EMP3, ENO1, FBXO7, FCER1G, FGL2, FLVCR2, FTL, FURIN, FUT8, FXR1, GAPDH, GAS7, GBP2, GIMAP4, GLOD4, GNS, GRAP2, GSTO1, HEBP1, HIST1H2BM, HIST1H3C, HIST1H4L, HLA-DPA1, HMG20B, HMGN4, HOXB6, HSPA4, ID3, IFIT1, IFNGR2, IL7R, IMP3, IMPDH1, INPP1, ISG20, ITGAX, ITGB1, KATNA1, KLF2, KLRF1, LAMP1, LFNG, LHFPL2, LILRB3, LTA4H, LTF, MAP4K2, MAPK14, MAPK8IP3, MCTP1, MEGF9, METTL9, MFSD10, MICAL1, MMP8, MNT, MRPS18B, MUT, MX1, MYL9, MYOM2, NAGK, NMI, NUPL2, OBFC1, OSBPL9, PAFAH2, PARL, PDCD5, PDGFC, PHB, PHF3, PLAC8, PLEKHG3, PLEKHM2, POLR2C, PPP1CA, PPP1CB, PPP1R11, PROS1, PRPF40A, PRRG4, PSMB4, PSTPIP2, PTPN2, PUS3, RAB11FIP1, RAB11FIP3, RAB9A, RANBP10, RASGRP2, RASGRP3, RASSF7, RDX, RNASE6, RNF34, RPA2, RPS6KB2, RPS8, S100A12, S100P, SASH3, SBF1, SDF2L1, SDHC, SERTAD2, SH3BGRL, SH3GLB2, SLAMF7, SLC11A2, SLC12A9, SLC25A37, SLC2A3, SLC39A8, SLC9A3R1, SNAPC1, SORT1, SSBP2, ST3GAL5, ST3GAL6, STK38, SYNE2, TAX1BP1, TIMP1, TINF2, TLR5, TMEM106C, TMEM80, TOB1, TPP2, TRAF3IP2, USP3, VAV1, WDR33, YPEL5, and ZBTB17. Non-limiting examples of nucleotide sequences for these RO BaSIRS biomarkers are listed in SEQ ID NOs: 1-179. Non-limiting examples of amino acid sequences for these RO BaSIRS biomarkers are listed in SEQ ID NOs: 180-358. In illustrative examples, an individual RO BaSIRS biomarker is selected from the group consisting of: (a) a polynucleotide expression product comprising a nucleotide sequence that shares at least 70% (or at least 71% to at least 99% and all integer percentages in between) sequence identity with the sequence set forth in any one of SEQ ID NO: 1-179, or a complement thereof; (b) a polynucleotide expression product comprising a nucleotide sequence that encodes a polypeptide comprising the amino acid sequence set forth in any one of SEQ ID NO: 180-358; (c) a polynucleotide expression product comprising a nucleotide sequence that encodes a polypeptide that shares at least 70% (or at least 71% to at least 99% and all integer percentages in between) sequence similarity or identity with at least a portion of the sequence set forth in SEQ ID NO: 180-358; (d) a polynucleotide expression product comprising a nucleotide sequence that hybridizes to the sequence of (a), (b), (c) or a complement thereof, under medium or high stringency conditions; (e) a polypeptide expression product comprising the amino acid sequence set forth in any one of SEQ ID NO: 180-358; and (f) a polypeptide expression product comprising an amino acid sequence that shares at least 70% (or at least 71% to at least 99% and all integer percentages in between) sequence similarity or identity with the sequence set forth in any one of SEQ ID NO: 180-358.

[0019] The RO BaSIRS biomarkers of the present invention have strong negative predictive value when combined with one or more other RO BaSIRS biomarkers. In some embodiments, pairs of biomarkers are used to determine the indicator. In illustrative examples of this type, one biomarker of a biomarker pair is selected from Group A RO BaSIRS biomarkers and the other is selected from Group B RO BaSIRS biomarkers, wherein an individual Group A RO BaSIRS biomarker is an expression product of a gene selected from the group consisting of: DIAPH2, CYBB, SLC39A8, PRPF40A, MUT, NMI, PUS3, MNT, SLC11A2, FXR1, SNAPC1, PRRG4, SLAMF7, MAPK8IP3, GBP2, PPP1CB, TMEM80, HIST1H2BM, NAGK, HIST1H4L and wherein an individual Group B RO BaSIRS biomarker is an expression product of a gene selected from the group consisting of: SERTAD2, PHF3, BRD7, TOB1, MAP4K2, WDR33, BTG2, AMD1, RNASE6, RAB11FIP1, ADD1, HMG20B.

[0020] In other illustrative examples, one biomarker of a biomarker pair is selected from Group C RO BaSIRS biomarkers and the other is selected from Group D RO BaSIRS biomarkers, wherein an individual Group C RO BaSIRS biomarker is an expression product of a gene selected from the group consisting of: PARL, AIF1, PTPN2, COX5B, PSMB4, EIF4E2, RDX, DERA, CTSH, HSPA4, VAV1, PPP1CA, CPVL, PDCD5, and wherein an individual Group D RO BaSIRS biomarker is an expression product of a gene selected from the group consisting of: PAFAH2, IMP3, GLOD4, IL7R, ID3, KLRF1, SBF1, CCND2, LFNG, MRPS18B, HLA-DPA1, SLC9A3R1, HMGN4, C6orf48, ARL2BP, CDC14A, RPA2, ST3GAL5, EIF4A2, CERK, RASSF7, PHB, TRAF3IP2, KLF2, RAB11FIP3, C21orf59, SSBP2, GIMAP4, CYP20A1, RASGRP2, AKT1, HCP5, TPP2, SYNE2, FUT8, NUPL2, MYOM2, RPS8, RNF34, DLST, CTDSP2, EMP3, PLEKHG3, DHX16, RASGRP3, COMMD4, ISG20, POLR2C, SH3GLB2, SASH3, GRAP2, RPS6KB2, FGL2, AKAP7, SDF2L1, FBXO7, MX1, IFIT1, TMEM106C, RANBP10.

[0021] In other illustrative examples, one biomarker of a biomarker pair is selected from Group E RO BaSIRS biomarkers and the other is selected from Group F RO BaSIRS biomarkers, wherein an individual Group E RO BaSIRS biomarker is an expression product of a gene selected from the group consisting of: SORT, GAS7, FLVCR2, TLR5, FCER1G, SLC2A3, S100A12, PSTPIP2, GNS, METTL9, MMP8, MAPK14, CD59, CLEC4E, MICAL1, MCTP1, GAPDH, IMPDH1, ATP8B4, EMR1, SLC12A9, S100P, IFNGR2, PDGFC, CTSA, ALDOA, ITGAX, GSTO1, LHFPL2, LTF, SDHC, TIMP1, LTA4H, USP3, MEGF9, FURIN, ATP6V0A1, PROS1, ATG9A, PLAC8, LAMP1, COQ10B, ST3GAL6, CTSC, ENO1, OBFC1, TAX1BP1, MYL9, HIST1H3C, ZBTB17, CHPT1, SLC25A37, PLEKHM2, LILRB3, YPEL5, FTL, SH3BGRL, HOXB6, PPP1R11, CLU, HEBP1, and wherein an individual Group F RO BaSIRS biomarker is an expression product of a gene selected from the group consisting of: OSBPL9, CD44, AKTIP, ATP13A3, ADAM19, KATNA1, STK38, TINF2, RAB9A, INPP1, CNBP, ITGB1, MFSD10.

[0022] In some embodiments, biomarker values are measured or derived for a Group A RO BaSIRS biomarker and for a Group B RO BaSIRS biomarker, and the indicator is determined by combining the biomarker values. In some embodiments, biomarker values are measured or derived for a Group C RO BaSIRS biomarker and for a Group D RO BaSIRS biomarker, and the indicator is determined by combining the biomarker values. In some embodiments, biomarker values are measured or derived for a Group E RO BaSIRS biomarker and for a Group F RO BaSIRS biomarker, and the indicator is determined by combining the biomarker values. In other embodiments, biomarker values are measured or derived for a Group A RO BaSIRS biomarker, for a Group B RO BaSIRS biomarker, for a Group C RO BaSIRS biomarker and for a Group D RO BaSIRS biomarker, and the indicator is determined by combining the biomarker values. In other embodiments, biomarker values are measured or derived for a Group A RO BaSIRS biomarker, for a Group B RO BaSIRS biomarker, for a Group C RO BaSIRS biomarker, for a Group D RO BaSIRS biomarker, for a Group E RO BaSIRS biomarker, for a Group F RO BaSIRS biomarker, and the indicator is determined by combining the biomarker values. Suitably, in the above embodiments, the methods comprise combining the biomarker values using a combining function, wherein the combining function is at least one of: an additive model; a linear model; a support vector machine; a neural network model; a random forest model; a regression model; a genetic algorithm; an annealing algorithm; a weighted sum; a nearest neighbor model; and a probabilistic model.

[0023] In some embodiments, the methods comprise: (a) determining a pair of biomarker values, each biomarker value being a value measured or derived for at least one corresponding RO BaSIRS biomarker; (b) determining a derived biomarker value using the pair of biomarker values, the derived biomarker value being indicative of a ratio of concentrations of the pair of RO BaSIRS biomarkers; and determining the indicator using the derived marker value. In illustrative examples of this type, biomarker values are measured or derived for a Group A RO BaSIRS biomarker and for a Group B RO BaSIRS biomarker to obtain the pair of biomarker values and the derived biomarker value is determined using the pair of biomarker values. In other illustrative examples, biomarker values are measured or derived for a Group C RO BaSIRS biomarker and for a Group D RO BaSIRS biomarker to obtain the pair of biomarker values and the derived biomarker value is determined using the pair of biomarker values. In other illustrative examples, biomarker values are measured or derived for a Group E RO BaSIRS biomarker and for a Group F RO BaSIRS biomarker to obtain the pair of biomarker values and the derived biomarker value is determined using the pair of biomarker values.

[0024] In some embodiments, the methods comprise: (a) determining a first derived biomarker value using a first pair of biomarker values, the first derived biomarker value being indicative of a ratio of concentrations of first and second RO BaSIRS biomarkers; (b) determining a second derived biomarker value using a second pair of biomarker values, the second derived biomarker value being indicative of a ratio of concentrations of third and fourth RO BaSIRS biomarkers; (c) determining a third derived biomarker value using a third pair of biomarker values, the third derived biomarker value being indicative of a ratio of concentrations of fifth and sixth RO BaSIRS biomarkers; and (d) determining the indicator by combining the first, second and third derived biomarker values. Suitably, the first RO BaSIRS biomarker is selected from Group A RO BaSIRS biomarkers, the second RO BaSIRS biomarker is selected from Group B RO BaSIRS biomarkers, the third RO BaSIRS biomarker is selected from Group C RO BaSIRS biomarkers, the fourth RO BaSIRS biomarker is selected from Group D RO BaSIRS biomarkers, the fifth RO BaSIRS biomarker is selected from Group E RO BaSIRS biomarkers, and the sixth RO BaSIRS biomarker is selected from Group F RO BaSIRS biomarkers. In illustrative examples of this type, the methods comprise combining the biomarker values using a combining function, wherein the combining function is at least one of: an additive model; a linear model; a support vector machine; a neural network model; a random forest model; a regression model; a genetic algorithm; an annealing algorithm; a weighted sum; a nearest neighbor model; and a probabilistic model.

[0025] Suitably, in embodiments that utilize pairs of RO BaSIRS biomarkers as broadly described above and elsewhere herein, an individual pair of RO BaSIRS biomarkers has a mutual correlation in respect of ruling out BaSIRS that lies within a mutual correlation range, the mutual correlation range being between ±0.9 (or between ±0.8, ±0.7, ±0.6, ±0.5, ±0.4, ±0.3, ±0.2 or ±0.1) and the indicator has a performance value greater than or equal to a performance threshold representing the ability of the indicator to diagnose the absence of BaSIRS, wherein the performance threshold is indicative of an explained variance of at least 0.3. In illustrative examples of this type, an individual RO BaSIRS biomarker has a condition correlation with the absence of RO BaSIRS that lies outside a condition correlation range, wherein the condition correlation range is between ±0.3. In other illustrative examples, an individual RO BaSIRS biomarker has a condition correlation with the absence of BaSIRS that lies outside a condition correlation range, wherein the condition correlation range is at least one of ±0.9, ±0.8, ±0.7, ±0.6, ±0.5 or ±0.4. In specific embodiments, the performance threshold is indicative of an explained variance of at least one of 0.4, 0.5, 0.6, 0.7, 0.8 and 0.9.

[0026] In certain embodiments that utilize pairs of RO BaSIRS biomarkers as broadly described above and elsewhere herein the Group A RO BaSIRS biomarker is suitably an expression product of DIAPH2, the Group B RO BaSIRS biomarker is suitably an expression product of SERTAD2, the Group C RO BaSIRS biomarker is suitably an expression product of PARL, the Group D RO BaSIRS biomarker is suitably an expression product of PAFAH2, the Group E RO BaSIRS biomarker is suitably an expression product of SORT1, and the Group F RO BaSIRS biomarker is suitably an expression product of OSBPL9.

[0027] Another aspect of the present invention provides apparatus for determining an indicator used in assessing a likelihood of a subject having an absence of BaSIRS. This apparatus generally comprises at least one electronic processing device that:
[0028] a) determines a pair of biomarker values, each biomarker value being a value measured or derived for at least one corresponding RO BaSIRS biomarker, as broadly described above and elsewhere herein, of a sample taken from the subject and being at least partially indicative of a concentration of the RO BaSIRS biomarker in the sample;
[0029] b) determines a derived biomarker value using the pair of biomarker values, the derived biomarker value being indicative of a ratio of concentrations of the pair of RO BaSIRS biomarkers; and
[0030] c) determines the indicator using the derived biomarker value.

[0031] In yet another aspect, the present invention provides compositions for determining an indicator used in assessing a likelihood of a subject having an absence of BaSIRS. These compositions generally comprise, consist or consist essentially of at least one pair of cDNAs and at least one oligonucleotide primer or probe that hybridizes to an individual one of the cDNAs, wherein the at least one pair of cDNAs is selected from pairs of cDNAs including a first pair, a second pair and a third pair of cDNAs, wherein the first pair comprises a Group A RO BaSIRS biomarker cDNA and a Group B RO BaSIRS biomarker cDNA, and wherein the second pair comprises a Group C RO BaSIRS biomarker cDNA and a Group D RO BaSIRS biomarker cDNA, and wherein the third pair comprises a Group E RO BaSIRS biomarker cDNA and a Group F RO BaSIRS biomarker cDNA. Suitably, the compositions comprise a population of cDNAs corresponding to mRNA derived from a cell or cell population. In some embodiments, the cell is a cell of the immune system, suitably a leukocyte. In some embodiments, the cell population is blood, suitably peripheral blood. In some embodiments, the at least one oligonucleotide primer or probe is hybridized to an individual one of the cDNAs. In any of the above embodiments, the composition may further comprise a labeled reagent for detecting the cDNA. In illustrative examples of this type, the labeled reagent is a labeled said at least one oligonucleotide primer or probe. In other embodiments, the labeled reagent is a labeled said cDNA. Suitably, the at least one oligonucleotide primer or probe is in a form other than a high density array. In non-limiting examples of these embodiments, the compositions comprise labeled reagents for detecting and/or quantifying no more than 4, 5, 6, 7, 8, 9, 10, 15, 20, 30, 40 or 50 different RO BaSIRS biomarker cDNAs. In specific embodiments, the compositions comprise for a respective cDNA, (1) two oligonucleotide primers (e.g., nucleic acid amplification primers) that hybridize to opposite complementary strands of the cDNA, and (2) an oligonucleotide probe that hybridizes to the cDNA. In some embodiments, one or both of the oligonucleotide primers are labeled. In some embodiments, the oligonucleotide probe is labeled. In illustrative examples, the oligonucleotide primers are not labeled and the oligonucleotide probe is labeled. Suitably, in embodiments in which the oligonucleotide probe is labeled, the labeled oligonucleotide probe comprises a fluorophore. In representative examples of this type, the labeled oligonucleotide probe further comprises a quencher. In certain embodiments, different labeled oligonucleotide probes are included in the composition for hybridizing to different cDNAs, wherein individual oligonucleotide probes comprise detectably distinct labels (e.g. different fluorophores).

[0032] Still another aspect of the present invention provides kits for determining an indicator which is indicative of the likelihood of the absence of BaSIRS, and on which the likelihood of BaSIRS is ruled out or not. The kits generally comprise, consist or consist essentially of at least one pair of reagents selected from reagent pairs including a first pair of reagents, a second pair of reagents and a third pair of reagents, wherein the first pair of reagents comprises (i) a reagent that allows quantification of a Group A RO BaSIRS biomarker; and (ii) a reagent that allows quantification of a Group B RO BaSIRS biomarker, wherein the second pair of reagents comprises: (iii) a reagent that allows quantification of a Group C RO BaSIRS biomarker; and (iv) a reagent that allows quantification of a Group D RO BaSIRS biomarker, and wherein the third pair of reagents comprises: (v) a reagent that allows quantification of a Group E RO BaSIRS biomarker; and (vi) a reagent that allows quantification of a Group F RO BaSIRS biomarker. In non-limiting examples of these embodiments, the kits comprise labeled reagents for detecting and/or quantifying no more than 4, 5, 6, 7, 8, 9, 10, 15, 20, 30, 40 or 50 different RO BaSIRS biomarker polynucleotides (e.g., mRNAs, cDNAs, etc.).

[0033] In a further aspect, the present invention provides methods for managing a subject with at least one clinical sign of SIRS. These methods generally comprise, consist or consist essentially of: not exposing the subject to a treatment regimen for specifically treating BaSIRS based on an indicator obtained from an indicator-determining method, wherein the indicator is indicative of the absence of BaSIRS in the subject, and of ruling out the likelihood of the presence of BaSIRS in the subject, and wherein the indicator-determining method is an indicator-determining method as broadly described above and elsewhere herein. In some embodiments, when the indicator is indicative of the absence of BaSIRS in the subject, the methods further comprise exposing the subject to a non-BaSIRS treatment. In illustrative examples of this type, the non-BaSIRS treatment is a treatment for a SIRS other than BaSIRS (e.g., a treatment for ADaSIRS, CANaSIRS, TRAUMaSIRS, ANAPHYLaSIRS, SCHIZaSIRS and VaSIRS). In other embodiments, when the indicator is indicative of the absence of BaSIRS in the subject, the methods further comprises not exposing the subject to a treatment. In some embodiments, the methods further comprise taking a sample from the subject and determining an indicator indicative of the likelihood of the absence of BaSIRS using the indicator-determining method. In other embodiments, the methods further comprise sending a sample taken from the subject to a laboratory at which the indicator is determined according to the indicator-determining method. In these embodiments, the methods suitably further comprise receiving the indicator from the laboratory.

### BRIEF DESCRIPTION OF THE DRAWINGS

[0034] FIG. 1a: ROC curves for the components of the derived biomarker signature consisting of DIAPH2/SERTAD2; PARL/PAFAH2; SORT1/OSBPL9. The dashed line is the ROC curve for DIAPH2/SERTAD2 alone (AUC=0.863). The full line is for the combination of DIAPH2/SERTAD2; PARL/PAFAH2 (AUC=0.92). The dotted line is for the combination of DIAPH2/SERTAD2; PARL/PAFAH2; SORT1/OSBPL9 (AUC=0.94).

[0035] FIG. 1b: ROC curve for the final triage signature consisting of DIAPH2/SERTAD2; PARL/PAFAH2; SORT1/OSBPL9 indicating the chosen specificity and sensitivity used to determine AUC and NPV at set prevalences of 10% and 5% (see Table 6 and Table 7), and NPV at prevalences of 4%, 6%, 8% and 10% (see Table 8).

[0036] FIG. 2: Box and whisker plots of the performance of the combined derived biomarker signature (DIAPH2/SERTAD2; PARL/PAFAH2; SORT1/OSBPL9) in the BaSIRS datasets. Dark dots represent the control samples (those subjects without BaSIRS) and lighter dots represent samples from those patients with BaSIRS.

[0037] FIG. 3: Scatter plot showing performance of the combined derived biomarker signature (DIAPH2/SERTAD2; PARL/PAFAH2; SORT1/OSBPL9) in all of the samples in the BaSIRS datasets. Dark dots represent the control samples (those subjects without BaSIRS) and lighter dots represent samples from those patients with BaSIRS (case). The AUC for the combined derived biomarker signature is 0.94.

[0038] FIG. 4: Plots of AUC versus the number and identity of biomarker ratios applying a correlation filter at different coefficient cut-off values. Correlation cut-off values of 70, 80 and 90 were used for selecting derived biomarkers from the non-BaSIRS datasets by removing ratios with high pair-wise correlations. As such the data was enriched to contain ratios with orthogonal information, i.e. ratios that contain biologically relevant information but have lower correlation to each other. Such derived biomarkers were then subtracted from the pool of derived biomarkers from the BaSIRS datasets. The lower the cut-off value the larger the number of derived biomarkers that were subtracted. As such, 92, 493 and 3257 derived biomarkers remained following subtraction when using cut-off values of 70, 80 and 90 respectively. Ultimately a cut-off of 70 was used to ensure specificity in the final derived biomarker signature (see curve on the left hand side). Looking at the curves it can be seen that the AUC increases with each successive addition of a derived biomarker. It was considered that a combination of three derived biomarkers provided the best AUC (0.94) with the least likelihood of introduction of noise. As such, the combination of DIAPH2/SERTAD2; PARL/PAFAH2; SORT1/OSBPL9 was considered to have the greatest commercial utility.

[0039] FIG. 5a: Box and whisker plot of the results of validation of this six biomarker signature on an unseen validation set of ED patients presenting with fever, the AUC was 0.903 between bacterial positive patients and all others (viral positive and bacterial negative pooled). Each patient was clinically and retrospectively (note, not at the time the sample was taken) confirmed as having either a bacteria isolated from a sterile site, a confirmed viral infection or no positive microbiology result (and the patient was not on antibiotics). Each patient sample had a SeptiCyte Triage score calculated (Y axis on left hand side). In this instance, on a scale of minus 0.4 to positive 0.4, it can be seen that patients with positive clinical microbiology obtain a higher Diagnostic Score compared to those without positive microbiology. Patients with a confirmed viral infection (only) also have a low Diagnostic Score. Further, it can be seen that an arbitrary cut-off line can be drawn that more or less separates the two conditions depending upon the desired false negative or false positive rate (when using clinical microbiology as the gold standard).

[0040] FIG. 5b: Box and whisker plot of the results of validation of a six biomarker signature, DIAPH2/SERTAD2; PARL/PAFAH2; SORT1/OSBPL9, on an expanded cohort of 59 ED patients presenting with fever and admitted to hospital. Each patient was clinically and retrospectively (note, not at the time the sample was taken) confirmed as having either a bacteria isolated from a sterile site (“bacterial”, n=32), a confirmed viral infection (virus identified=“Viral”, n=14) or no positive microbiology result (and the patient was not on antibiotics and the condition resolved=“No positive micro, no Abx”, n=13). Only those patients suspected of having a viral infection were tested for the presence of the suspected virus. Each patient sample had a SeptiCyte Triage score calculated (Y axis on left hand side). In this instance, it can be seen that patients with positive clinical microbiology obtain a higher Diagnostic Score compared to those without positive microbiology. Patients with a confirmed viral infection (only) also have a lower Diagnostic Score. AUCs for bacterial vs viral and bacterial vs indeterminate are 0.79 and 0.65 respectively. Negative Predictive Value (NPV) for bacterial vs other is 0.975 (at a sepsis prevalence of 4%, specificity of 0.78, sensitivity of 0.53 and threshold 25). It should be noted that patients were selected based on presenting signs of a fever, which is not a good indicator of a bacterial infection and, as such, this patient cohort is not fully representative of patients that would be tested for being at risk of sepsis. Further, not all patients received comprehensive microbial or viral testing and, as such, the final diagnosis for some patients is based on clinical impression only. The performance of individual ratios in this signature can be found in Table 6.

[0041] FIG. 5c: Box and whisker plot of the results of validation of another six biomarker signature, DIAPH2/IL7R+GBP2/GIMAP4+TLR5/FGL2 (using biomarkers from different groups for each ratio), on an expanded cohort of 59 ED patients presenting with fever and admitted to hospital. Each patient sample had a SeptiCyte Triage score calculated (Y axis on left hand side). In this instance, it can be seen that patients with positive clinical microbiology obtain a higher Diagnostic Score compared to those without positive microbiology. Patients with a confirmed viral infection (only) also have a lower Diagnostic Score. AUCs for bacterial vs viral and bacterial vs indeterminate are 0.93 and 0.83 respectively. Negative Predictive Value (NPV) for bacterial vs other is 0.978 (at a sepsis prevalence of 4%, specificity of 0.9, sensitivity of 0.53 and threshold 0.00). The performance of individual ratios in this signature can be found in Table 6.

[0042] FIG. 6: Example output depicting an indicator that is useful for assessing the absence of BaSIRS in a patient. In this instance the patient had a score of 5.9 indicating a >80% likelihood of BaSIRS.

### BRIEF DESCRIPTION OF THE TABLES

[0043] Table 1: List and condition description of public datasets (GEO) used to find the best performing BaSIRS derived biomarkers for use in a triage setting, including the number of subjects in each cohort (in brackets).

[0044] Table 2: List and condition description of public datasets (GEO) used to find the best performing non-bacterial SIRS derived biomarkers. These were then subtracted from the BaSIRS derived biomarkers identified from the datasets in Table 1. Note that other datasets were used to derive a set of specific viral derived biomarkers which were also subtracted from the BaSIRS derived biomarkers identified from the datasets in Table 1.

[0045] Table 3: The mean cumulative performance (AUC) in the BaSIRS datasets of the derived biomarkers (that comprise the three derived biomarker signature) when each are added sequentially.

[0046] Table 4: Results of greedy searches to find the best performing derived biomarkers (when added sequentially up to 10) using the combined bacterial datasets. Three different cut-off values were used (r=70, 80 and 90) for derived biomarkers in the non-bacterial datasets. Using a low cut-off value in the non-bacterial datasets resulted in more derived biomarkers that were taken from the pool of derived biomarkers identified using the bacterial datasets. Hence, the total numbers of derived biomarkers remaining after subtraction were 92, 493 and 3257 for cut-off values of 70, 80 and 90 respectively. The best combination of derived biomarkers with the maximum AUC, maximum specificity, minimum noise and highest commercial utility was considered to be DIAPH2/SERTAD2; PARL/PAFAH2; SORT1/OSBPL9 obtained after the third greedy search iteration.

[0047] Table 5 (a and b): Groups of derived biomarkers (A-F) based on their correlation to each individual biomarker in the three derived biomarker signature of DIAPH2/SERTAD2; PARL/PAFAH2; SORT1/OSBPL9. Groups A-C are contained in Table 5a and Groups D-F are contained in Table 5b. A DNA SEQ ID# is provided for each biomarker HUGO gene symbol.

[0048] Table 6: Performance of 200 derived biomarkers at a set sepsis prevalence of 10%. Performance measures include Area Under Curve (AUC) and Negative Predictive Value (NPV). The NPV of these derived biomarkers increases as the prevalence of sepsis decreases, so all those listed would perform well in an emergency room setting where the prevalence of sepsis is estimated to be closer to 4%.

[0049] Table 7: Performance of 200 derived biomarkers at a set sepsis prevalence of 5%.

[0050] Table 8: Table of calculated negative predictive values (NPV) for the final triage signature (DIAPH2/SERTAD2; PARL/PAFAH2; SORT1/OSBPL9) at sepsis prevalences of 4, 6, 8 and 10%. Based on the scientific literature, the prevalence of sepsis in the ER is approximately 4%. For these calculations the sensitivity and specificity were set at 0.9535 and 0.7303 respectively based on the ROC curve for the final triage signature (see FIG. 1b).

[0051] Table 9: List of numerators and denominators that occur more than once in the top 200 derived biomarkers.

[0052] Table 10: SEQ ID numbers, HUGO gene symbol and Ensembl ID for individual biomarkers.

[0053] Table 11: SEQ ID numbers, HUGO gene symbol and Ensembl ID for individual biomarkers.

### DETAILED DESCRIPTION OF THE INVENTION

### 1. Definitions

[0054] Unless defined otherwise, all technical and scientific terms used herein have the same meaning as commonly understood by those of ordinary skill in the art to which the invention belongs. Although any methods and materials similar or equivalent to those described herein can be used in the practice or testing of the present invention, preferred methods and materials are described. For the purposes of the present invention, the following terms are defined below.

[0055] The articles “a” and “an” are used herein to refer to one or to more than one (i.e., to at least one) of the grammatical object of the article. By way of example, “an element” means one element or more than one element.

[0056] As used herein, “and/or” refers to and encompasses any and all possible combinations of one or more of the associated listed items, as well as the lack of combinations when interpreted in the alternative (or).

[0057] The term “biomarker” broadly refers to any detectable compound, such as a protein, a peptide, a proteoglycan, a glycoprotein, a lipoprotein, a carbohydrate, a lipid, a nucleic acid (e.g., DNA, such as cDNA or amplified DNA, or RNA, such as mRNA), an organic or inorganic chemical, a natural or synthetic polymer, a small molecule (e.g., a metabolite), or a discriminating molecule or discriminating fragment of any of the foregoing, that is present in or derived from a sample. “Derived from” as used in this context refers to a compound that, when detected, is indicative of a particular molecule being present in the sample. For example, detection of a particular cDNA can be indicative of the presence of a particular RNA transcript in the sample. As another example, detection of or binding to a particular antibody can be indicative of the presence of a particular antigen (e.g., protein) in the sample. Here, a discriminating molecule or fragment is a molecule or fragment that, when detected, indicates presence or abundance of an above-identified compound. A biomarker can, for example, be isolated from a sample, directly measured in a sample, or detected in or determined to be in a sample. A biomarker can, for example, be functional, partially functional, or non-functional. In specific embodiments, the “biomarkers” include “immune system biomarkers”, which are described in more detail below.

[0058] The term “biomarker value” refers to a value measured or derived for at least one corresponding biomarker of a subject and which is typically at least partially indicative of an abundance or concentration of a biomarker in a sample taken from the subject. Thus, biomarker values could be measured biomarker values, which are values of biomarkers measured for the subject, or alternatively could be derived biomarker values, which are values that have been derived from one or more measured biomarker values, for example by applying a function to the one or more measured biomarker values. Biomarker values can be of any appropriate form depending on the manner in which the values are determined. For example, the biomarker values could be determined using high-throughput technologies such as mass spectrometry, sequencing platforms, array and hybridization platforms, immunoassays, flow cytometry, or any combination of such technologies and in one preferred example, the biomarker values relate to a level of activity or abundance of an expression product or other measurable molecule, quantified using a technique such as polymerase chain reaction (PCR), sequencing or the like. In this case, the biomarker values can be in the form of amplification amounts, or cycle times, which are a logarithmic representation of the concentration of the biomarker within a sample, as will be appreciated by persons skilled in the art and as will be described in more detail below.

[0059] As used herein, the term “biomarker profile” refers to a plurality of one or more types of biomarkers (e.g., an mRNA molecule, a cDNA molecule and/or a protein, etc.), or an indication thereof, together with a feature, such as a measurable aspect (e.g., biomarker value) of the biomarker(s). A biomarker profile may comprise at least two such biomarkers or indications thereof, where the biomarkers can be in the same or different classes, such as, for example, a nucleic acid and a polypeptide. Thus, a biomarker profile may comprise at least 2, 3, 4, 5, 6, 7, 8, 9, 10, 11, 12, 13, 14, 15, 16, 17, 18, 19, 20, 21, 22, 23, 24, 25, 30, 35, 40, 45, 50, 55, 60, 65, 70, 75, 80, 85, 90, 95, or 100 or more biomarkers or indications thereof. In some embodiments, a biomarker profile comprises hundreds, or even thousands, of biomarkers or indications thereof. A biomarker profile can further comprise one or more controls or internal standards. In certain embodiments, the biomarker profile comprises at least one biomarker, or indication thereof, that serves as an internal standard. In other embodiments, a biomarker profile comprises an indication of one or more types of biomarkers. The term “indication” as used herein in this context merely refers to a situation where the biomarker profile contains symbols, data, abbreviations or other similar indicia for a biomarker, rather than the biomarker molecular entity itself. The term “biomarker profile” is also used herein to refer to a combination of at least two biomarker values, wherein individual biomarker values correspond to values of biomarkers that can be measured or derived from one or more subjects, which combination is characteristic of a discrete condition or not, stage of condition or not, subtype of condition or not or a prognosis for a discrete condition or not, stage of condition or not, subtype of condition or not. The term “profile biomarkers” is used to refer to a subset of the biomarkers that have been identified for use in a biomarker profile that can be used in performing a clinical assessment, such as to rule in or rule out a specific condition, different stages or severity of conditions, subtypes of different conditions or different prognoses. The number of profile biomarkers will vary, but is typically of the order of 10 or less.

[0060] The terms “complementary” and “complementarity” refer to polynucleotides (i.e., a sequence of nucleotides) related by the base-pairing rules. For example, the sequence “A-G-T,” is complementary to the sequence “T-C-A.” Complementarity may be “partial,” in which only some of the nucleic acids' bases are matched according to the base pairing rules. Or, there may be “complete” or “total” complementarity between the nucleic acids. The degree of complementarity between nucleic acid strands has significant effects on the efficiency and strength of hybridization between nucleic acid strands.

[0061] Throughout this specification, unless the context requires otherwise, the words “comprise,” “comprises” and “comprising” will be understood to imply the inclusion of a stated step or element or group of steps or elements but not the exclusion of any other step or element or group of steps or elements. Thus, use of the term “comprising” and the like indicates that the listed elements are required or mandatory, but that other elements are optional and may or may not be present. By “consisting of” is meant including, and limited to, whatever follows the phrase “consisting of”. Thus, the phrase “consisting of” indicates that the listed elements are required or mandatory, and that no other elements may be present. By “consisting essentially of” is meant including any elements listed after the phrase, and limited to other elements that do not interfere with or contribute to the activity or action specified in the disclosure for the listed elements. Thus, the phrase “consisting essentially of” indicates that the listed elements are required or mandatory, but that other elements are optional and may or may not be present depending upon whether or not they affect the activity or action of the listed elements.

[0062] The term “correlating” refers to determining a relationship between one type of data with another or with a state.

[0063] As used herein, the terms “detectably distinct” and “detectably different” are used interchangeably herein to refer to a signal that is distinguishable or separable by a physical property either by observation or by instrumentation. For example, a fluorophore is readily distinguishable either by spectral characteristics or by fluorescence intensity, lifetime, polarization or photo-bleaching rate from another fluorophore in a sample, as well as from additional materials that are optionally present. In certain embodiments, the terms “detectably distinct” and “detectably different” refer to a set of labels (such as dyes, suitably organic dyes) that can be detected and distinguished simultaneously.

[0064] As used herein, the terms “diagnosis”, “diagnosing” and the like are used interchangeably herein to encompass determining the likelihood that a subject has or a condition, or not, or will develop a condition, or not, or the existence or nature of a condition in a subject. These terms also encompass determining the severity of disease or episode of disease, as well as in the context of rational therapy, in which the diagnosis guides therapy, including initial selection of therapy, modification of therapy (e.g., adjustment of dose or dosage regimen), and the like. By “likelihood” is meant a measure of whether a subject with particular measured or derived biomarker values actually has a condition, or not, based on a given mathematical model. An increased likelihood for example may be relative or absolute and may be expressed qualitatively or quantitatively. For instance, a decreased likelihood may be determined simply by determining the subject's measured or derived biomarker values for at least two RO BaSIRS biomarkers and placing the subject in an “decreased likelihood” category, based upon previous population studies. The term “likelihood” is also used interchangeably herein with the term “probability”. The term “risk” relates to the possibility or probability of a particular event occurring at some point in the future. “Risk stratification” refers to an arraying of known clinical risk factors to allow physicians to classify patients into a low, moderate, high or highest risk of having, or developing, a particular disease or condition.

[0065] As used herein, “emergency” refers to any location, including an emergency care environment, where subjects feeling unwell or subjects looking for an evaluation of their individual risk of developing certain diseases present, in order to consult a person having a medical background, preferably a physician, to obtain an analysis of their physiological status and/or the cause underlying their discomfort. Typical examples are emergency departments (ED) or emergency rooms (ER) in hospitals, ambulances, medical doctors' practices or doctors' offices and other institutions suitable for diagnosis and/or treatment of subjects.

[0066] “Fluorophore” as used herein to refer to a moiety that absorbs light energy at a defined excitation wavelength and emits light energy at a different defined wavelength. Examples of fluorescence labels include, but are not limited to: Alexa Fluor dyes (Alexa Fluor 350, Alexa Fluor 488, Alexa Fluor 532, Alexa Fluor 546, Alexa Fluor 568, Alexa Fluor 594, Alexa Fluor 633, Alexa Fluor 660 and Alexa Fluor 680), AMCA, AMCA-S, BODIPY dyes (BODIPY FL, BODIPY R6G, BODIPY TMR, BODIPY TR, BODIPY 530/550, BODIPY 558/568, BODIPY 564/570, BODIPY 576/589, BODIPY 581/591, BODIPY 630/650, BODIPY 650/665), Carboxyrhodamine 6G, carboxy-X-rhodamine (ROX), Cascade Blue, Cascade Yellow, Cyanine dyes (Cy3, Cy5, Cy3.5, Cy5.5), Dansyl, Dapoxyl, Dialkylaminocoumarin, 4′,5′-Dichloro-2′,7′-dimethoxy-fluorescein, DM-NERF, Eosin, Erythrosin, Fluorescein, FAM, Hydroxycoumarin, IRDyes (IRD40, IRD 700, IRD 800), JOE, Lissamine rhodamine B, Marina Blue, Methoxycoumarin, Naphthofluorescein, Oregon Green 488, Oregon Green 500, Oregon Green 514, Pacific Blue, PyMPO, Pyrene, Rhodamine 6G, Rhodamine Green, Rhodamine Red, Rhodol Green, 2′,4′,5′,7′-Tetra-bromosulfone-fluorescein, Tetramethyl-rhodamine (TMR), Carboxytetramethylrhodamine (TAMRA), Texas Red and Texas Red-X.

[0067] The term “gene”, as used herein, refers to a stretch of nucleic acid that codes for a polypeptide or for an RNA chain that has a function. While it is the exon region of a gene that is transcribed to form mRNA, the term “gene” also includes regulatory regions such as promoters and enhancers that govern expression of the exon region.

[0068] The term “high-density array” refers to a substrate or collection of substrates or surfaces bearing a plurality of array elements (e.g., discrete regions having particular moieties, e.g., proteins (e.g., antibodies), nucleic acids (e.g., oligonucleotide probes), etc., immobilized thereto), where the array elements are present at a density of about 100 elements/cm² or more, about 1,000 elements/cm² or more, about 10,000 elements/cm² or more, or about 100,000 elements/cm² or more. In specific embodiments, a “high-density array” is one that comprises a plurality of array elements for detecting about 100 or more different biomarkers, about 1,000 or more different biomarkers, about 10,000 or more different biomarkers, or about 100,000 or more different biomarkers. In representative example of these embodiments, a “high-density array” is one that comprises a plurality of array elements for detecting biomarkers of about 100 or more different genes, of about 1,000 or more different genes, of about 10,000 or more different genes, or of about 100,000 or more different genes. Generally, the elements of a high-density array are not labeled. The term “low-density array” refers to a substrate or collection of substrates or surfaces bearing a plurality of array elements (e.g., discrete regions having particular moieties, e.g., proteins (e.g., antibodies), nucleic acids (e.g., oligonucleotide probes), etc., immobilized thereto), where the array elements are present at a density of about 100 elements/cm² or less, about 50 elements/cm² or less, about 20 elements/cm² or less, or about 10 elements/cm² or less. In specific embodiments, a “low-density array” is one that comprises a plurality of array elements for detecting about 100 or less different biomarkers, about 50 or less different biomarkers, about 20 or less different biomarkers, or about 10 or less different biomarkers. In representative example of these embodiments, a “low-density array” is one that comprises a plurality of array elements for detecting biomarkers of about 100 or less different genes, of about 50 or less different genes, of about 20 or less different genes, or of about 10 or less different genes. Generally, the elements of a low-density array are not labeled. In specific embodiments, the a “high-density array” or “low-density array” is a microarray.

[0069] The term “indicator” as used herein refers to a result or representation of a result, including any information, number, ratio, signal, sign, mark, or note by which a skilled artisan can estimate and/or determine a likelihood or risk of whether or not a subject is suffering from a given disease or condition. In the case of the present invention, the “indicator” may optionally be used together with other clinical characteristics, to arrive at a diagnosis (that is, the occurrence or nonoccurrence) of an absence of BaSIRS or a prognosis for a non-BaSIRS condition in a subject. That such an indicator is “determined” is not meant to imply that the indicator is 100% accurate. The skilled clinician may use the indicator together with other clinical indicia to arrive at a diagnosis.

[0070] The term “immobilized” means that a molecular species of interest is fixed to a solid support, suitably by covalent linkage. This covalent linkage can be achieved by different means depending on the molecular nature of the molecular species. Moreover, the molecular species may be also fixed on the solid support by electrostatic forces, hydrophobic or hydrophilic interactions or Van-der-Waals forces. The above described physico-chemical interactions typically occur in interactions between molecules. In particular embodiments, all that is required is that the molecules (e.g., nucleic acids or polypeptides) remain immobilized or attached to a support under conditions in which it is intended to use the support, for example in applications requiring nucleic acid amplification and/or sequencing or in in antibody-binding assays. For example, oligonucleotides or primers are immobilized such that a 3′ end is available for enzymatic extension and/or at least a portion of the sequence is capable of hybridizing to a complementary sequence. In some embodiments, immobilization can occur via hybridization to a surface attached primer, in which case the immobilized primer or oligonucleotide may be in the 3′-5′ orientation. In other embodiments, immobilization can occur by means other than base-pairing hybridization, such as the covalent attachment.

[0071] The term “immune system”, as used herein, refers to cells, molecular components and mechanisms, including antigen-specific and non-specific categories of the adaptive and innate immune systems, respectively, that provide a defense against damage and insults resulting from a viral infection. The term “innate immune system” refers to a host's non-specific reaction to insult to include antigen-nonspecific defense cells, molecular components and mechanisms that come into action immediately or within several hours after exposure to almost any insult or antigen. Elements of the innate immunity include for example phagocytic cells (monocytes, macrophages, dendritic cells, polymorphonuclear leukocytes such as neutrophils, reticuloendothelial cells such as Küpffer cells, and microglia), cells that release inflammatory mediators (basophils, mast cells and eosinophils), natural killer cells (NK cells) and physical barriers and molecules such as keratin, mucous, secretions, complement proteins, immunoglobulin M (IgM), acute phase proteins, fibrinogen and molecules of the clotting cascade, and cytokines. Effector compounds of the innate immune system include chemicals such as lysozymes, IgM, mucous and chemoattractants (e.g., cytokines or histamine), complement and clotting proteins. The term “adaptive immune system” refers to antigen-specific cells, molecular components and mechanisms that emerge over several days, and react with and remove a specific antigen. The adaptive immune system develops throughout a host's lifetime. The adaptive immune system is based on leukocytes, and is divided into two major sections: the humoral immune system, which acts mainly via immunoglobulins produced by B cells, and the cell-mediated immune system, which functions mainly via T cells.

[0072] Reference herein to “immuno-interactive” includes reference to any interaction, reaction, or other form of association between molecules and in particular where one of the molecules is, or mimics, a component of the immune system.

[0073] As used herein, the term “label” and grammatical equivalents thereof, refer to any atom or molecule that can be used to provide a detectable and/or quantifiable signal. In particular, the label can be attached, directly or indirectly, to a nucleic acid or protein. Suitable labels that can be attached include, but are not limited to, radioisotopes, fluorophores, quenchers, chromophores, mass labels, electron dense particles, magnetic particles, spin labels, molecules that emit chemiluminescence, electrochemically active molecules, enzymes, cofactors, and enzyme substrates. A label can include an atom or molecule capable of producing a visually detectable signal when reacted with an enzyme. In some embodiments, the label is a “direct” label which is capable of spontaneously producing a detectible signal without the addition of ancillary reagents and is detected by visual means without the aid of instruments. For example, colloidal gold particles can be used as the label. Many labels are well known to those skilled in the art. In specific embodiments, the label is other than a naturally-occurring nucleoside. The term “label” also refers to an agent that has been artificially added, linked or attached via chemical manipulation to a molecule.

[0074] The term “microarray” refers to an arrangement of hybridizable array elements, e.g., probes (including primers), ligands, biomarker nucleic acid sequence or protein sequences on a substrate.

[0075] The term “nucleic acid” or “polynucleotide” as used herein includes RNA, mRNA, miRNA, cRNA, cDNA mtDNA, or DNA. The term typically refers to a polymeric form of nucleotides of at least 10 bases in length, either ribonucleotides or deoxynucleotides or a modified form of either type of nucleotide. The term includes single and double stranded forms of DNA or RNA.

[0076] By “obtained” is meant to come into possession. Samples so obtained include, for example, nucleic acid extracts or polypeptide extracts isolated or derived from a particular source. For instance, the extract may be isolated directly from a biological fluid or tissue of a subject.

[0077] “Protein”, “polypeptide” and “peptide” are used interchangeably herein to refer to a polymer of amino acid residues and to variants and synthetic analogues of the same.

[0078] By “primer” is meant an oligonucleotide which, when paired with a strand of DNA, is capable of initiating the synthesis of a primer extension product in the presence of a suitable polymerizing agent. The primer is preferably single-stranded for maximum efficiency in amplification but can alternatively be double-stranded. A primer must be sufficiently long to prime the synthesis of extension products in the presence of the polymerization agent. The length of the primer depends on many factors, including application, temperature to be employed, template reaction conditions, other reagents, and source of primers. For example, depending on the complexity of the target sequence, the primer may be at least about 5, 6, 7, 8, 9, 10, 11, 12, 13, 14, 15, 16, 17, 18, 19, 20, 21, 22, 23, 24, 25, 26, 27, 28, 29, 30, 35, 40, 50, 75, 100, 150, 200, 300, 400, 500, to one base shorter in length than the template sequence at the 3′ end of the primer to allow extension of a nucleic acid chain, though the 5′ end of the primer may extend in length beyond the 3′ end of the template sequence. In certain embodiments, primers can be large polynucleotides, such as from about 35 nucleotides to several kilobases or more. Primers can be selected to be “substantially complementary” to the sequence on the template to which it is designed to hybridize and serve as a site for the initiation of synthesis. By “substantially complementary”, it is meant that the primer is sufficiently complementary to hybridize with a target polynucleotide. Desirably, the primer contains no mismatches with the template to which it is designed to hybridize but this is not essential. For example, non-complementary nucleotide residues can be attached to the 5′ end of the primer, with the remainder of the primer sequence being complementary to the template. Alternatively, non-complementary nucleotide residues or a stretch of non-complementary nucleotide residues can be interspersed into a primer, provided that the primer sequence has sufficient complementarity with the sequence of the template to hybridize therewith and thereby form a template for synthesis of the extension product of the primer.

[0079] As used herein, the term “probe” refers to a molecule that binds to a specific sequence or sub-sequence or other moiety of another molecule. Unless otherwise indicated, the term “probe” typically refers to a nucleic acid probe that binds to another nucleic acid, also referred to herein as a “target polynucleotide”, through complementary base pairing. Probes can bind target polynucleotides lacking complete sequence complementarity with the probe, depending on the stringency of the hybridization conditions. Probes can be labeled directly or indirectly and include primers within their scope.

[0080] The term “prognosis” as used herein refers to a prediction of the probable course and outcome of a clinical condition or disease. A prognosis is usually made by evaluating factors or symptoms of a disease that are indicative of a favorable or unfavorable course or outcome of the disease. The skilled artisan will understand that the term “prognosis” refers to an increased probability that a certain course or outcome will occur; that is, that a course or outcome is more likely to occur in a subject exhibiting a given condition, when compared to those individuals not exhibiting the condition.

[0081] As used herein, the term “quencher” includes any moiety that in close proximity to a donor fluorophore, takes up emission energy generated by the donor fluorophore and either dissipates the energy as heat or emits light of a longer wavelength than the emission wavelength of the donor fluorophore. In the latter case, the quencher is considered to be an acceptor fluorophore. The quenching moiety can act via proximal (i.e., collisional) quenching or by Forster or fluorescence resonance energy transfer (“FRET”). Quenching by FRET is generally used in TaqMan® probes while proximal quenching is used in molecular beacon and Scorpion® type probes. Suitable quenchers are selected based on the fluorescence spectrum of the particular fluorophore. Useful quenchers include, for example, the Black Hole™ quenchers BHQ-1, BHQ-2, and BHQ-3 (Biosearch Technologies, Inc.), and the ATTO-series of quenchers (ATTO 540Q, ATTO 580Q, and ATTO 612Q; Atto-Tec GmbH).

[0082] The term “rule-out” and its grammatical equivalents refer to a diagnostic test with high sensitivity that optionally coupled with a clinical assessment indicates a lower likelihood for BaSIRS. Accordingly, the term “ruling out” as used herein is meant that the subject is selected not to receive a BaSIRS treatment protocol or regimen.

[0083] The term “sample” as used herein includes any biological specimen that may be extracted, untreated, treated, diluted or concentrated from a subject. Samples may include, without limitation, biological fluids such as whole blood, serum, red blood cells, white blood cells, plasma, saliva, urine, stool (i.e., feces), tears, sweat, sebum, nipple aspirate, ductal lavage, tumor exudates, synovial fluid, ascitic fluid, peritoneal fluid, amniotic fluid, cerebrospinal fluid, lymph, fine needle aspirate, amniotic fluid, any other bodily fluid, cell lysates, cellular secretion products, inflammation fluid, semen and vaginal secretions. Samples may include tissue samples and biopsies, tissue homogenates and the like. Advantageous samples may include ones comprising any one or more biomarkers as taught herein in detectable quantities. Suitably, the sample is readily obtainable by minimally invasive methods, allowing the removal or isolation of the sample from the subject. In certain embodiments, the sample contains blood, especially peripheral blood, or a fraction or extract thereof. Typically, the sample comprises blood cells such as mature, immature or developing leukocytes, including lymphocytes, polymorphonuclear leukocytes, neutrophils, monocytes, reticulocytes, basophils, coelomocytes, hemocytes, eosinophils, megakaryocytes, macrophages, dendritic cells natural killer cells, or fraction of such cells (e.g., a nucleic acid or protein fraction). In specific embodiments, the sample comprises leukocytes including peripheral blood mononuclear cells (PBMC).

[0084] The term “solid support” as used herein refers to a solid inert surface or body to which a molecular species, such as a nucleic acid and polypeptides can be immobilized. Non-limiting examples of solid supports include glass surfaces, plastic surfaces, latex, dextran, polystyrene surfaces, polypropylene surfaces, polyacrylamide gels, gold surfaces, and silicon wafers. In some embodiments, the solid supports are in the form of membranes, chips or particles. For example, the solid support may be a glass surface (e.g., a planar surface of a flow cell channel). In some embodiments, the solid support may comprise an inert substrate or matrix which has been “functionalized”, such as by applying a layer or coating of an intermediate material comprising reactive groups which permit covalent attachment to molecules such as polynucleotides. By way of non-limiting example, such supports can include polyacrylamide hydrogels supported on an inert substrate such as glass. The molecules (e.g., polynucleotides) can be directly covalently attached to the intermediate material (e.g., a hydrogel) but the intermediate material can itself be non-covalently attached to the substrate or matrix (e.g., a glass substrate). The support can include a plurality of particles or beads each having a different attached molecular species.

[0085] As used herein, the term SIRS (“systemic inflammatory response syndrome”) refers to a clinical response arising from a non-specific insult with two or more of the following measureable clinical characteristics; a body temperature greater than 38° C. or less than 36° C., a heart rate greater than 90 beats per minute, a respiratory rate greater than 20 per minute, a white blood cell count (total leukocytes) greater than 12,000 per mm³ or less than 4,000 per mm³, or a band neutrophil percentage greater than 10%. From an immunological perspective, it may be seen as representing a systemic response to insult (e.g., major surgery) or systemic inflammation. As used herein, “BaSIRS” includes any one or more (e.g., 1, 2, 3, 4, 5) of the clinical responses noted above but with underlying bacterial infection etiology. Confirmation of infection can be determined using any suitable procedure known in the art, illustrative examples of which include blood culture, nucleic acid detection (e.g., PCR, mass spectroscopy, immunological detection (e.g., ELISA), isolation of bacteria from infected cells, cell lysis and imaging techniques such as electron microscopy. From an immunological perspective, BaSIRS may be seen as a systemic response to bacterial infection, whether it is a local, peripheral or systemic infection.

[0086] The terms “subject”, “individual” and “patient” are used interchangeably herein to refer to an animal subject, particularly a vertebrate subject, and even more particularly a mammalian subject. Suitable vertebrate animals that fall within the scope of the invention include, but are not restricted to, any member of the phylum Chordata, subphylum vertebrata including primates, rodents (e.g., mice rats, guinea pigs), lagomorphs (e.g., rabbits, hares), bovines (e.g., cattle), ovines (e.g., sheep), caprines (e.g., goats), porcines (e.g., pigs), equines (e.g., horses), canines (e.g., dogs), felines (e.g., cats), avians (e.g., chickens, turkeys, ducks, geese, companion birds such as canaries, budgerigars etc.), marine mammals (e.g., dolphins, whales), reptiles (snakes, frogs, lizards, etc.), and fish. A preferred subject is a primate (e.g., a human, ape, monkey, chimpanzee). The subject suitably has at least one (e.g., 1, 2, 3, 4, 5 or more) clinical sign of SIRS.

[0087] As used herein, the term “treatment regimen” refers to prophylactic and/or therapeutic (i.e., after onset of a specified condition) treatments, unless the context specifically indicates otherwise. The term “treatment regimen” encompasses natural substances and pharmaceutical agents (i.e., “drugs”) as well as any other treatment regimen including but not limited to dietary treatments, physical therapy or exercise regimens, surgical interventions, and combinations thereof.

[0088] It will be appreciated that the terms used herein and associated definitions are used for the purpose of explanation only and are not intended to be limiting.

### 2. Bacterial Systemic Inflammation Biomarkers and their Use for Identifying Subjects with and without BaSIRS

[0089] The present invention concerns methods, apparatus, compositions and kits for identifying subjects without BaSIRS or for providing strong negative predictive value in patients presenting to emergency rooms suspected of having BaSIRS. In particular, RO BaSIRS biomarkers are disclosed for use in these modalities to assess the likelihood of the absence of BaSIRS in subjects, or for providing high negative predictive value for BaSIRS in subjects presenting to emergency with at least one clinical sign of SIRS. The methods, apparatus, compositions and kits of the invention are useful for exclusion of BaSIRS as a diagnosis, thus allowing better treatment interventions for subjects with symptoms of SIRS that do not have a bacterial infection.

[0090] The present inventors have determined that certain expression products are commonly, specifically and differentially expressed during systemic inflammations with a range of bacterial etiologies. The results presented herein provide clear evidence that a unique biologically-relevant biomarker profile can exclude BaSIRS with a NPV greater than 95% in emergency room patients. This rule-out “bacterial” systemic inflammation biomarker profile was validated in an independently derived external dataset consisting of subjects presenting to emergency with fever (see FIG. 5), and subsequently produced an AUC of 0.903 between infection positive and control patients (infection negative or viral positive). Overall, these findings provide compelling evidence that the expression products disclosed herein can function as biomarkers for excluding BaSIRS and may potentially serve as a useful diagnostic for triaging treatment decisions for SIRS-affected subjects. In this regard, it is proposed that the methods, apparatus, compositions and kits disclosed herein that are based on these biomarkers may serve in the point-of-care diagnostics that allow for rapid and inexpensive screening for BaSIRS, which may result in significant cost savings to the medical system as subjects without BaSIRS can be either exposed, or not exposed, to appropriate management procedures and therapeutic agents, including antibiotics, that are suitable for treating a particular type of SIRS.

[0091] Thus, specific expression products are disclosed herein as RO BaSIRS biomarkers that provide a means for distinguishing BaSIRS from other SIRS conditions including ADaSIRS, CANaSIRS, TRAUMaSIRS, ANAPHYLaSIRS, SCHIZaSIRS and VaSIRS. Evaluation of these RO BaSIRS biomarkers through analysis of their levels in a subject or in a sample taken from a subject provides a measured or derived biomarker value for determining an indicator that can be used for assessing the absence of BaSIRS in a subject.

[0092] Accordingly, biomarker values can be measured derived biomarker values, which are values that have been derived from one or more measured biomarker values, for example by applying a function to the one or more measured biomarker values. As used herein, biomarkers to which a function has been applied are referred to as “derived markers”.

[0093] The biomarker values may be determined in any one of a number of ways. An exemplary method of determining biomarker values is described by the present inventors in WO 2015/117204, which is incorporated herein by reference in its entirety. In one example, the process of determining biomarker values can include measuring the biomarker values, for example by performing tests on the subject or on sample(s) taken from the subject. More typically however, the step of determining the biomarker values includes having an electronic processing device receive or otherwise obtain biomarker values that have been previously measured or derived. This could include for example, retrieving the biomarker values from a data store such as a remote database, obtaining biomarker values that have been manually input, using an input device, or the like. The indicator is determined using a combination of the plurality of biomarker values, the indicator being at least partially indicative of the absence of BaSIRS. Assuming the method is performed using an electronic processing device, an indication of the indicator is optionally displayed or otherwise provided to the user. In this regard, the indication could be a graphical or alphanumeric representation of an indicator value. Alternatively however, the indication could be the result of a comparison of the indicator value to predefined thresholds or ranges, or alternatively could be an indication of the absence of a BaSIRS derived using the indicator.

[0094] In some embodiments, biomarker values are combined, for example by adding, multiplying, subtracting, or dividing biomarker values to determine an indicator value. This step is performed so that multiple biomarker values can be combined into a single indicator value, providing a more useful and straightforward mechanism for allowing the indicator to be interpreted and hence used in diagnosing the absence of BaSIRS in the subject.

[0095] In some embodiments in which a plurality of biomarkers and biomarker values are used, in order to ensure that an effective diagnosis or prognosis can be determined, at least two of the biomarkers have a mutual correlation in respect of absence of BaSIRS that lies within a mutual correlation range, the mutual correlation range being between ±0.9. This requirement means that the two biomarkers are not entirely correlated in respect of each other when considered in the context of the absence of BaSIRS being diagnosed or prognosed. In other words, at least two of the biomarkers in the combination respond differently as the condition changes, which adds significantly to their ability when combined to discriminate between at least two conditions, to diagnose the absence of BaSIRS.

[0096] Typically, the requirement that biomarkers have a low mutual correlation means that the biomarkers may relate to different biological attributes or domains such as, but not limited, to different molecular functions, different biological processes and different cellular components. Illustrative examples of molecular function include addition of, or removal of, one of more of the following moieties to, or from, a protein, polypeptide, peptide, nucleic acid (e.g., DNA, RNA): linear, branched, saturated or unsaturated alkyl (e.g., C₁-C₂₄ alkyl); phosphate; ubiquitin; acyl; fatty acid, lipid, phospholipid; nucleotide base; hydroxyl and the like. Molecular functions also include signaling pathways, including without limitation, receptor signaling pathways and nuclear signaling pathways. Non-limiting examples of molecular functions also include cleavage of a nucleic acid, peptide, polypeptide or protein at one or more sites; polymerization of a nucleic acid, peptide, polypeptide or protein; translocation through a cell membrane (e.g., outer cell membrane; nuclear membrane); translocation into or out of a cell organelle (e.g., Golgi apparatus, lysosome, endoplasmic reticulum, nucleus, mitochondria); receptor binding, receptor signaling, membrane channel binding, membrane channel influx or efflux; and the like.

[0097] Illustrative examples of biological processes include: stages of the cell cycle such as meiosis, mitosis, cell division, prophase, metaphase, anaphase, telophase and interphase, stages of cell differentiation; apoptosis; necrosis; chemotaxis; immune responses including adaptive and innate immune responses, pro-inflammatory immune responses, autoimmune responses, tolerogenic responses and the like. Other illustrative examples of biological processes include generating or breaking down adenosine triphosphate (ATP), saccharides, polysaccharides, fatty acids, lipids, phospholipids, sphingolipids, glycolipids, cholesterol, nucleotides, nucleic acids, membranes (e.g., cell plasma membrane, nuclear membrane), amino acids, peptides, polypeptides, proteins and the like. Representative examples of cellular components include organelles, membranes, as for example noted above, and others.

[0098] It will be understood that the use of biomarkers that have different biological attributes or domains provides further information than if the biomarkers were related to the same or common biological attributes or domains. In this regard, it will be appreciated if the at least two biomarkers are highly correlated to each other, the use of both biomarkers would add little diagnostic/prognostic improvement compared to the use of a single one of the biomarkers. Accordingly, an indicator-determining method of the present invention in which a plurality of biomarkers and biomarker values are used preferably employ biomarkers that are not well correlated with each other, thereby ensuring that the inclusion of each biomarker in the method adds significantly to the discriminative ability of the indicator.

[0099] Despite this, in order to ensure that the indicator can accurately be used in performing the discrimination between at least two conditions (e.g., BaSIRS and a SIRS other than BaSIRS), or the diagnosis of the absence of BaSIRS, the indicator has a performance value that is greater than or equal to a performance threshold. The performance threshold may be of any suitable form but is to be typically indicative of an explained variance of at least 0.3, or an equivalent value of another performance measure.

[0100] Suitably, a combination of biomarkers is employed, which biomarkers have a mutual correlation between ±0.9 and which combination provides an explained variance of at least 0.3. This typically allows an indicator to be defined that is suitable for ensuring that an accurate discrimination, diagnosis or prognosis can be obtained whilst minimizing the number of biomarkers that are required. Typically the mutual correlation range is one of ±0.8; ±0.7; ±0.6; ±0.5; ±0.4; ±0.3; ±0.2; and, ±0.1. Typically each RO BaSIRS biomarker has a condition correlation with the absence of BaSIRS that lies outside a condition correlation range, the condition correlation range being between ±0.3 and more typically ±0.9; ±0.8; ±0.7; ±0.6; ±0.5; and, ±0.4. Typically the performance threshold is indicative of an explained variance of at least one of 0.4; 0.5; 0.6; 0.7; 0.8; and 0.9.

[0101] It will be understood that in this context, the biomarkers used within the above-described method can define a biomarker profile indicative of the likelihood of an absence of BaSIRS or for ruling out BaSIRS, which includes a minimal number of biomarkers, whilst maintaining sufficient performance to allow the biomarker profile to be used in making a clinically relevant diagnosis, prognosis, or differentiation. Minimizing the number of biomarkers used minimizes the costs associated with performing diagnostic or prognostic tests and in the case of nucleic acid expression products, allows the test to be performed utilizing relatively straightforward techniques such as nucleic acid array, and PCR processes, or the like, allowing the test to be performed rapidly in a clinical environment.

[0102] Furthermore, producing a single indicator value allows the results of the test to be easily interpreted by a clinician or other medical practitioner, so that test can be used for reliable diagnosis in a clinical environment.

[0103] Processes for generating suitable biomarker profiles are described for example in WO 2015/117204, which uses the term “biomarker signature” in place of “biomarker profile” as defined herein. It will be understood, therefore, that terms “biomarker profile” and “biomarker signature” are equivalent in scope. The biomarker profile-generating processes disclosed in WO 2015/117204 provide mechanisms for selecting a combination of biomarkers, and more typically derived biomarkers, that can be used to form a biomarker profile, which in turn can be used in diagnosing the absence of BaSIRS. In this regard, the biomarker profile defines the biomarkers that should be measured (i.e., the profile biomarkers), how derived biomarker values should be determined for measured biomarker values, and then how biomarker values should be subsequently combined to generate an indicator value. The biomarker profile can also specify defined indicator value ranges that indicate a particular absence of BaSIRS.

[0104] Using the above-described methods a number of biomarkers have been identified that are particularly useful for assessing a likelihood that a subject has an absence of BaSIRS and for ruling out the presence of BaSIRS in a subject. These biomarkers are referred to herein as “RO BaSIRS biomarkers”. As used herein, the term “RO BaSIRS biomarker” refers to a biomarker of the host, generally a biomarker of the host's immune system, which is altered, or whose level of expression is altered, as part of an inflammatory response to damage or insult resulting from a SIRS other than BaSIRS. The RO BaSIRS biomarkers are suitably expression products of genes (also referred to interchangeably herein as “RO BaSIRS biomarker genes”), including polynucleotide and polypeptide expression products. As used herein, polynucleotide expression products of RO BaSIRS biomarker genes are referred to herein as “RO BaSIRS biomarker polynucleotides.” Polypeptide expression products of the RO BaSIRS biomarker genes are referred to herein as “RO BaSIRS biomarker polypeptides.”

[0105] RO BaSIRS biomarkers are suitably selected from expression products of any one or more of the following RO BaSIRS genes: ADAM19, ADD, ADGRE1, AIF1, AKAP7, AKT1, AKTIP, ALDOA, AMD1, ARL2BP, ATG9A, ATP13A3, ATP6V0A1, ATP8B4, BRD7, BTG2, C21orf59, C6orf48, CCND2, CD44, CD59, CDC14A, CERK, CHPT1, CLEC4E, CLU, CNBP, COMMD4, COQ10B, COX5B, CPVL, CTDSP2, CTSA, CTSC, CTSH, CYBB, CYP20A1, DERA, DHX16, DIAPH2, DLST, EIF4A2, EIF4E2, EMP3, ENO1, FBXO7, FCER1G, FGL2, FLVCR2, FTL, FURIN, FUT8, FXR1, GAPDH, GAS7, GBP2, GIMAP4, GLOD4, GNS, GRAP2, GSTO1, HEBP1, HIST1H2BM, HIST1H3C, HIST1H4L, HLA-DPA1, HMG20B, HMGN4, HOXB6, HSPA4, ID3, IFIT1, IFNGR2, IL7R, IMP3, IMPDH1, INPP1, ISG20, ITGAX, ITGB1, KATNA1, KLF2, KLRF1, LAMP1, LFNG, LHFPL2, LILRB3, LTA4H, LTF, MAP4K2, MAPK14, MAPK8IP3, MCTP1, MEGF9, METTL9, MFSD10, MICAL1, MMP8, MNT, MRPS18B, MUT, MX1, MYL9, MYOM2, NAGK, NMI, NUPL2, OBFC1, OSBPL9, PAFAH2, PARL, PDCD5, PDGFC, PHB, PHF3, PLAC8, PLEKHG3, PLEKHM2, POLR2C, PPP1CA, PPP1CB, PPP1R11, PROS1, PRPF40A, PRRG4, PSMB4, PSTPIP2, PTPN2, PUS3, RAB11FIP1, RAB11FIP3, RAB9A, RANBP10, RASGRP2, RASGRP3, RASSF7, RDX, RNASE6, RNF34, RPA2, RPS6KB2, RPS8, S100A12, S100P, SASH3, SBF1, SDF2L1, SDHC, SERTAD2, SH3BGRL, SH3GLB2, SLAMF7, SLC11A2, SLC12A9, SLC25A37, SLC2A3, SLC39A8, SLC9A3R1, SNAPC1, SORT1, SSBP2, ST3GAL5, ST3GAL6, STK38, SYNE2, TAX1BP1, TIMP1, TINF2, TLR5, TMEM106C, TMEM80, TOB1, TPP2, TRAF3IP2, USP3, VAV1, WDR33, YPEL5, and ZBTB17. Non-limiting examples of nucleotide sequences for these RO BaSIRS biomarkers are listed in SEQ ID NOs: 1-179. Non-limiting examples of amino acid sequences for these RO BaSIRS biomarkers are listed in SEQ ID NOs: 180-358.

[0106] The present inventors have determined that certain RO BaSIRS biomarkers have strong diagnostic performance when combined with one or more other RO BaSIRS biomarkers. In advantageous embodiments, pairs of RO BaSIRS biomarkers have been identified that can be used to determine the indicator. Accordingly, in representative examples of this type, an indicator is determined that correlates to a ratio of RO BaSIRS biomarkers, which can be used in assessing a likelihood of a subject having an absence of RO BaSIRS, and for ruling out the presence of BaSIRS in the subject.

[0107] In these examples, the indicator-determining methods suitably include determining a pair of biomarker values, wherein each biomarker value is a value measured or derived for at least one corresponding RO BaSIRS biomarker of the subject and is at least partially indicative of a concentration of the RO BaSIRS biomarker in a sample taken from the subject. The biomarker values are typically used to determine a derived biomarker value using the pair of biomarker values, wherein the derived biomarker value is indicative of a ratio of concentrations of the pair of RO BaSIRS biomarkers. Thus, if the biomarker values denote the concentrations of the RO BaSIRS biomarkers, then the derived biomarker value will be based on a ratio of the biomarker values. However, if the biomarker values are related to the concentrations of the biomarkers, for example if they are logarithmically related by virtue of the biomarker values being based on PCR cycle times, or the like, then the biomarker values may be combined in some other manner, such as by subtracting the cycle times to determine a derived biomarker value indicative of a ratio of the concentrations of the RO BaSIRS biomarkers.

[0108] The derived biomarker value is then used to determine the indicator, either by using the derived biomarker value as an indicator value, or by performing additional processing, such as comparing the derived biomarker value to a reference or the like, as will be described in more detail below.

[0109] In some embodiments in which pairs of RO BaSIRS biomarkers are used to determine a derived biomarker value, one biomarker of a biomarker pair is selected from Group A RO BaSIRS biomarkers and the other is selected from Group B RO BaSIRS biomarkers, wherein an individual Group A RO BaSIRS biomarker is an expression product of a gene selected from the group consisting of: DIAPH2, CYBB, SLC39A8, PRPF40A, MUT, NMI, PUS3, MNT, SLC11A2, FXR1, SNAPC1, PRRG4, SLAMF7, MAPK8IP3, GBP2, PPP1CB, TMEM80, HIST1H2BM, NAGK, HIST1H4L and wherein an individual Group B RO BaSIRS biomarker is an expression product of a gene selected from the group consisting of: SERTAD2, PHF3, BRD7, TOB1, MAP4K2, WDR33, BTG2, AMD1, RNASE6, RAB11FIP1, ADD1, HMG20B.

[0110] In other embodiments in which pairs of RO BaSIRS biomarkers are used to determine a derived biomarker value, one biomarker of a biomarker pair is selected from Group C RO BaSIRS biomarkers and the other is selected from Group D RO BaSIRS biomarkers, wherein an individual Group C RO BaSIRS biomarker is an expression product of a gene selected from the group consisting of: PARL, AIF1, PTPN2, COX5B, PSMB4, EIF4E2, RDX, DERA, CTSH, HSPA4, VAV1, PPP1CA, CPVL, PDCD5, and wherein an individual Group D RO BaSIRS biomarker is an expression product of a gene selected from the group consisting of: PAFAH2, IMP3, GLOD4, IL7R, ID3, KLRF1, SBF1, CCND2, LFNG, MRPS18B, HLA-DPA1, SLC9A3R1, HMGN4, C6orf48, ARL2BP, CDC14A, RPA2, ST3GAL5, EIF4A2, CERK, RASSF7, PHB, TRAF3IP2, KLF2, RAB11FIP3, C21orf59, SSBP2, GIMAP4, CYP20A1, RASGRP2, AKT1, HCP5, TPP2, SYNE2, FUT8, NUPL2, MYOM2, RPS8, RNF34, DLST, CTDSP2, EMP3, PLEKHG3, DHX16, RASGRP3, COMMD4, ISG20, POLR2C, SH3GLB2, SASH3, GRAP2, RPS6KB2, FGL2, AKAP7, SDF2L1, FBXO7, MX1, IFIT1, TMEM106C, RANBP10.

[0111] In other embodiments in which pairs of RO BaSIRS biomarkers are used to determine a derived biomarker value, one biomarker of a biomarker pair is selected from Group E RO BaSIRS biomarkers and the other is selected from Group F RO BaSIRS biomarkers, wherein an individual Group E RO BaSIRS biomarker is an expression product of a gene selected from the group consisting of: SORT1, GAS7, FLVCR2, TLR5, FCER1G, SLC2A3, S100A12, PSTPIP2, GNS, METTL9, MMP8, MAPK14, CD59, CLEC4E, MICAL1, MCTP1, GAPDH, IMPDH1, ATP8B4, EMR1, SLC12A9, S100P, IFNGR2, PDGFC, CTSA, ALDOA, ITGAX, GSTO1, LHFPL2, LTF, SDHC, TIMP1, LTA4H, USP3, MEGF9, FURIN, ATP6V0A1, PROS1, ATG9A, PLAC8, LAMP1, COQ10B, ST3GAL6, CTSC, ENO1, OBFC1, TAX1BP1, MYL9, HIST1H3C, ZBTB17, CHPT1, SLC25A37, PLEKHM2, LILRB3, YPEL5, FTL, SH3BGRL, HOXB6, PPP1R11, CLU, HEBP1, and wherein an individual Group F RO BaSIRS biomarker is an expression product of a gene selected from the group consisting of: OSBPL9, CD44, AKTIP, ATP13A3, ADAM19, KATNA1, STK38, TINF2, RAB9A, INPP1, CNBP, ITGB1, MFSD10.

[0112] In specific embodiments, the indicator-determining methods involve determining a first derived biomarker value using a first pair of biomarker values, the first derived biomarker value being indicative of a ratio of concentrations of first and second RO BaSIRS biomarkers, determining a second derived biomarker value using a second pair of biomarker values, the second derived biomarker value being indicative of a ratio of concentrations of third and fourth RO BaSIRS biomarkers, determining a third derived biomarker value using a third pair of biomarker values, the third derived biomarker value being indicative of a ratio of concentrations of fifth and sixth RO BaSIRS biomarkers and determining the indicator by combining the first, second and third derived biomarker values. Thus, in these embodiments, three pairs of derived biomarker values can be used, which can assist in increasing the ability of the indicator to reliably determine the likelihood of a subject having or not having BaSIRS.

[0113] The derived biomarker values could be combined using a combining function such as an additive model; a linear model; a support vector machine; a neural network model; a random forest model; a regression model; a genetic algorithm; an annealing algorithm; a weighted sum; a nearest neighbor model; and a probabilistic model. In some embodiments, biomarker values are measured or derived for a Group A RO BaSIRS biomarker and for a Group B RO BaSIRS biomarker, and the indicator is determined by combining the biomarker values. In some embodiments, biomarker values are measured or derived for a Group C RO BaSIRS biomarker and for a Group D RO BaSIRS biomarker, and the indicator is determined by combining the biomarker values. In some embodiments, biomarker values are measured or derived for a Group E RO BaSIRS biomarker and for a Group F RO BaSIRS biomarker, and the indicator is determined by combining the biomarker values. In still other embodiments, biomarker values are measured or derived for a Group A RO BaSIRS biomarker, for a Group B RO BaSIRS biomarker, for a Group C RO BaSIRS biomarker and for a Group D RO BaSIRS biomarker, and the indicator is determined by combining the biomarker values. In still other embodiments, biomarker values are measured or derived for a Group A RO BaSIRS biomarker, for a Group B RO BaSIRS biomarker, for a Group C RO BaSIRS biomarker, for a Group D RO BaSIRS biomarker, for a Group E RO BaSIRS biomarker and for a Group F RO BaSIRS biomarker and the indicator is determined by combining the biomarker values.

[0114] In some embodiments, the indicator is compared to an indicator reference, with a likelihood being determined in accordance with results of the comparison. The indicator reference may be derived from indicators determined for a number of individuals in a reference population. The reference population typically includes individuals having different characteristics, such as a plurality of individuals of different sexes; and/or ethnicities, with different groups being defined based on different characteristics, with the subject's indicator being compared to indicator references derived from individuals with similar characteristics. The reference population can also include a plurality of healthy individuals, a plurality of individuals suffering from BaSIRS, a plurality of individuals suffering from a SIRS other than BaSIRS (e.g., ADaSIRS, CANaSIRS, TRAUMaSIRS, ANAPHYLaSIRS, SCHIZaSIRS and VaSIRS), a plurality of individuals showing clinical signs of BaSIRS, a plurality of individuals showing clinical signs of a SIRS other than BaSIRS (e.g., ADaSIRS, CANaSIRS, TRAUMaSIRS, ANAPHYLaSIRS, SCHIZaSIRS and VaSIRS), and/or first and second groups of individuals, each group of individuals suffering from a respective diagnosed SIRS.

[0115] The indicator can also be used for determining a likelihood of the subject having a first or second condition, wherein the first condition is BaSIRS and the second condition is a healthy condition or a non-bacterial associated SIRS (e.g., ADaSIRS, CANaSIRS, TRAUMaSIRS, ANAPHYLaSIRS, SCHIZaSIRS and VaSIRS); in other words to distinguish between these conditions. In this case, this would typically be achieved by comparing the indicator to first and second indicator references, the first and second indicator references being indicative of first and second conditions and determining the likelihood in accordance with the results of the comparison. In particular, this can include determining first and second indicator probabilities using the results of the comparisons and combining the first and second indicator probabilities, for example using a Bayes method, to determine a condition probability corresponding to the likelihood of the subject having one of the conditions. In this situation the first and second conditions could include BaSIRS and a SIRS condition other than BaSIRS, or BaSIRS and a healthy condition. In this case, the first and second indicator references are distributions of indicators determined for first and second groups of a reference population, the first and second group consisting of individuals diagnosed with the first or second condition respectively.

[0116] In specific embodiments, the indicator-determining methods of the present invention are performed using at least one electronic processing device, such as a suitably programmed computer system or the like. In this case, the electronic processing device typically obtains at least three pairs of measured biomarker values, either by receiving these from a measuring or other quantifying device, or by retrieving these from a database or the like. The processing device then determines a first derived biomarker value indicative of a ratio of concentrations of first and second immune system biomarkers, a second derived biomarker value indicative of a ratio of third and fourth immune system biomarkers, and a third derived biomarker value indicative of a ratio of fifth and sixth immune system biomarkers. The processing device then determines the indicator by combining the first, second and third derived biomarker values.

[0117] The processing device can then generate a representation of the indicator, for example by generating an alphanumeric indication of the indicator, a graphical indication of a comparison of the indicator to one or more indicator references or an alphanumeric indication of a likelihood of the subject having at least one medical condition.

[0118] The indicator-determining methods of the present invention typically include obtaining a sample from a subject, who typically has at least one clinical sign of SIRS, wherein the sample includes one or more RO BaSIRS biomarkers (e.g., polynucleotide or polypeptide expression products of RO BaSIRS genes) and quantifying at least two (e.g., 2, 3, 4, 5, 6, 7, 8, 9, 10 or more) of the RO BaSIRS biomarkers within the sample to determine biomarker values. This can be achieved using any suitable technique, and will depend on the nature of the RO BaSIRS biomarkers. Suitably, an individual measured or derived RO BaSIRS biomarker value corresponds to the level, abundance or amount of a respective RO BaSIRS biomarker or to a function that is applied to that level or amount. As used herein the terms “level”, “abundance” and “amount” are used interchangeably herein to refer to a quantitative amount (e.g., weight or moles), a semi-quantitative amount, a relative amount (e.g., weight % or mole % within class), a concentration, and the like. Thus, these terms encompass absolute or relative amounts or concentrations of RO BaSIRS biomarkers in a sample. For example, if the indicator in some embodiments of the indicator-determining method of the present invention, which uses a plurality of RO BaSIRS biomarkers, is based on a ratio of concentrations of the polynucleotide expression products, this process would typically include quantifying polynucleotide expression products by amplifying at least some polynucleotide expression products in the sample, determining an amplification amount representing a degree of amplification required to obtain a defined level of each of a pair of polynucleotide expression products and determining the indicator by determining a difference between the amplification amounts. In this regard, the amplification amount is generally a cycle time, a number of cycles, a cycle threshold and an amplification time. In this case, the method includes determining a first derived biomarker value by determining a difference between the amplification amounts of a first pair of polynucleotide expression products, determining a second derived biomarker value by determining a difference between the amplification amounts of a second pair of polynucleotide expression products, determining a third derived biomarker value by determining a difference between the amplification amounts of a third pair of polynucleotide expression products and determining the indicator by adding the first, second and third derived biomarker values.

[0119] In some embodiments, the likelihood that BaSIRS is absent in a subject is established by determining two or more RO BaSIRS biomarker values, wherein a RO BaSIRS biomarker value is indicative of a value measured or derived for RO BaSIRS biomarkers in a subject or in a sample taken from the subject. These biomarkers are referred to herein as “sample RO BaSIRS biomarkers”. In accordance with the present invention, a sample RO BaSIRS biomarker corresponds to a reference RO BaSIRS biomarker (also referred to herein as a “corresponding RO BaSIRS biomarker”). By “corresponding RO BaSIRS biomarker” is meant a RO BaSIRS biomarker that is structurally and/or functionally similar to a reference RO BaSIRS biomarker as set forth for example in SEQ ID NOs: 1-179. Representative corresponding RO BaSIRS biomarkers include expression products of allelic variants (same locus), homologues (different locus), and orthologues (different organism) of reference RO BaSIRS biomarker genes. Nucleic acid variants of reference RO BaSIRS biomarker genes and encoded RO BaSIRS biomarker polynucleotide expression products can contain nucleotide substitutions, deletions, inversions and/or insertions. Variation can occur in either or both the coding and non-coding regions. The variations can produce both conservative and non-conservative amino acid substitutions (as compared in the encoded product). For nucleotide sequences, conservative variants include those sequences that, because of the degeneracy of the genetic code, encode the amino acid sequence of a reference RO BaSIRS polypeptide.

[0120] Generally, variants of a particular RO BaSIRS biomarker gene or polynucleotide will have at least about 40%, 45%, 50%, 51%, 52%, 53%, 54%, 55%, 56%, 57%, 58%, 59% 60%, 61%, 62%, 63%, 64%, 65%, 66%, 67%, 68%, 69% 70%, 71%, 72%, 73%, 74%, 75%, 76%, 77%, 78%, 79%, 80%, 81%, 82%, 83%, 84%, 85%, 86%, 87%, 88%, 89%, 90%, 91%, 92%, 93%, 94%, 95%, 96%, 97%, 98%, 99% or more sequence identity to that particular nucleotide sequence as determined by sequence alignment programs known in the art using default parameters. In some embodiments, the RO BaSIRS biomarker gene or polynucleotide displays at least about 40%, 45%, 50%, 51%, 52%, 53%, 54%, 55%, 56%, 57%, 58%, 59% 60%, 61%, 62%, 63%, 64%, 65%, 66%, 67%, 68%, 69% 70%, 71%, 72%, 73%, 74%, 75%, 76%, 77%, 78%, 79%, 80%, 81%, 82%, 83%, 84%, 85%, 86%, 87%, 88%, 89%, 90%, 91%, 92%, 93%, 94%, 95%, 96%, 97%, 98%, 99% or more sequence identity to a nucleotide sequence selected from any one of SEQ ID NO: 1-179.

[0121] Corresponding RO BaSIRS biomarkers also include amino acid sequences that display substantial sequence similarity or identity to the amino acid sequence of a reference RO BaSIRS biomarker polypeptide. In general, an amino acid sequence that corresponds to a reference amino acid sequence will display at least about 50, 51, 52, 53, 54, 55, 56, 57, 58, 59, 60, 61, 62, 63, 64, 65, 66, 67, 68, 69, 70, 71, 72, 73, 74, 75, 76, 77, 78, 79, 80, 81, 82, 83, 84, 85, 86, 97, 88, 89, 90, 91, 92, 93, 94, 95, 96, 97, 98, 99% or even up to 100% sequence similarity or identity to a reference amino acid sequence selected from any one of SEQ ID NO: 180-358.

[0122] In some embodiments, calculations of sequence similarity or sequence identity between sequences are performed as follows:

[0123] To determine the percentage identity of two amino acid sequences, or of two nucleic acid sequences, the sequences are aligned for optimal comparison purposes (e.g., gaps can be introduced in one or both of a first and a second amino acid or nucleic acid sequence for optimal alignment and non-homologous sequences can be disregarded for comparison purposes). In some embodiments, the length of a reference sequence aligned for comparison purposes is at least 30%, usually at least 40%, more usually at least 50%, 60%, and even more usually at least 70%, 80%, 90%, 100% of the length of the reference sequence. The amino acid residues or nucleotides at corresponding amino acid positions or nucleotide positions are then compared. When a position in the first sequence is occupied by the same amino acid residue or nucleotide at the corresponding position in the second sequence, then the molecules are identical at that position. For amino acid sequence comparison, when a position in the first sequence is occupied by the same or similar amino acid residue (i.e., conservative substitution) at the corresponding position in the second sequence, then the molecules are similar at that position.

[0124] The percentage identity between the two sequences is a function of the number of identical amino acid residues shared by the sequences at individual positions, taking into account the number of gaps, and the length of each gap, which need to be introduced for optimal alignment of the two sequences. By contrast, the percentage similarity between the two sequences is a function of the number of identical and similar amino acid residues shared by the sequences at individual positions, taking into account the number of gaps, and the length of each gap, which need to be introduced for optimal alignment of the two sequences.

[0125] The comparison of sequences and determination of percentage identity or percentage similarity between sequences can be accomplished using a mathematical algorithm. In certain embodiments, the percentage identity or similarity between amino acid sequences is determined using the Needleman and Wunsch, (1970, J. Mol. Biol. 48: 444-453) algorithm which has been incorporated into the GAP program in the GCG software package (available at http://www.gcg.com), using either a Blossum 62 matrix or a PAM250 matrix, and a gap weight of 16, 14, 12, 10, 8, 6, or 4 and a length weight of 1, 2, 3, 4, 5, or 6. In specific embodiments, the percent identity between nucleotide sequences is determined using the GAP program in the GCG software package (available at http://www.gcg.com), using a NWSgapdna.CMP matrix and a gap weight of 40, 50, 60, 70, or 80 and a length weight of 1, 2, 3, 4, 5, or 6. An non-limiting set of parameters (and the one that should be used unless otherwise specified) includes a Blossum 62 scoring matrix with a gap penalty of 12, a gap extend penalty of 4, and a frameshift gap penalty of 5.

[0126] In some embodiments, the percentage identity or similarity between amino acid or nucleotide sequences can be determined using the algorithm of E. Meyers and W. Miller (1989, Cabios, 4: 11-17) which has been incorporated into the ALIGN program (version 2.0), using a PAM120 weight residue table, a gap length penalty of 12 and a gap penalty of 4.

[0127] The nucleic acid and protein sequences described herein can be used as a “query sequence” to perform a search against public databases to, for example, identify other family members or related sequences. Such searches can be performed using the NBLAST and XBLAST programs (version 2.0) of Altschul, et al., (1990, J Mol Biol., 215: 403-10). BLAST nucleotide searches can be performed with the NBLAST program, score=100, wordlength=12 to obtain nucleotide sequences homologous to 53010 nucleic acid molecules of the invention. BLAST protein searches can be performed with the XBLAST program, score=50, wordlength=3 to obtain amino acid sequences homologous to protein molecules of the invention. To obtain gapped alignments for comparison purposes, Gapped BLAST can be utilized as described in Altschul et al., (1997, Nucleic Acids Res, 25: 3389-3402). When utilizing BLAST and Gapped BLAST programs, the default parameters of the respective programs (e.g., XBLAST and NBLAST) can be used.

[0128] Corresponding RO BaSIRS biomarker polynucleotides also include nucleic acid sequences that hybridize to reference RO BaSIRS biomarker polynucleotides, or to their complements, under stringency conditions described below. As used herein, the term “hybridizes under low stringency, medium stringency, high stringency, or very high stringency conditions” describes conditions for hybridization and washing. “Hybridization” is used herein to denote the pairing of complementary nucleotide sequences to produce a DNA-DNA hybrid or a DNA-RNA hybrid. Complementary base sequences are those sequences that are related by the base-pairing rules. In DNA, A pairs with T and C pairs with G. In RNA, U pairs with A and C pairs with G. In this regard, the terms “match” and “mismatch” as used herein refer to the hybridization potential of paired nucleotides in complementary nucleic acid strands. Matched nucleotides hybridize efficiently, such as the classical A-T and G-C base pair mentioned above. Mismatches are other combinations of nucleotides that do not hybridize efficiently.

[0129] Guidance for performing hybridization reactions can be found in Ausubel et al., (“CURRENT PROTOCOLS IN MOLECULAR BIOLOGY”, John Wiley & Sons Inc., 1994-1998), Sections 6.3.1-6.3.6. Aqueous and non-aqueous methods are described in that reference and either can be used. Reference herein to low stringency conditions include and encompass from at least about 1% v/v to at least about 15% v/v formamide and from at least about 1 M to at least about 2 M salt for hybridization at 42° C., and at least about 1 M to at least about 2 M salt for washing at 42° C. Low stringency conditions also may include 1% Bovine Serum Albumin (BSA), 1 mM EDTA, 0.5 M NaHPO₄ (pH 7.2), 7% SDS for hybridization at 65° C., and (i) 2×SSC, 0.1% SDS; or (ii) 0.5% BSA, 1 mM EDTA, 40 mM NaHPO₄ (pH 7.2), 5% SDS for washing at room temperature. One embodiment of low stringency conditions includes hybridization in 6× sodium chloride/sodium citrate (SSC) at about 45° C., followed by two washes in 0.2×SSC, 0.1% SDS at least at 50° C. (the temperature of the washes can be increased to 55° C. for low stringency conditions). Medium stringency conditions include and encompass from at least about 16% v/v to at least about 30% v/v formamide and from at least about 0.5 M to at least about 0.9 M salt for hybridization at 42° C., and at least about 0.1 M to at least about 0.2 M salt for washing at 55° C. Medium stringency conditions also may include 1% Bovine Serum Albumin (BSA), 1 mM EDTA, 0.5 M NaHPO₄ (pH 7.2), 7% SDS for hybridization at 65° C., and (i) 2×SSC, 0.1% SDS; or (ii) 0.5% BSA, 1 mM EDTA, 40 mM NaHPO₄ (pH 7.2), 5% SDS for washing at 60-65° C. One embodiment of medium stringency conditions includes hybridizing in 6×SSC at about 45° C., followed by one or more washes in 0.2×SSC, 0.1% SDS at 60° C. High stringency conditions include and encompass from at least about 31% v/v to at least about 50% v/v formamide and from about 0.01 M to about 0.15 M salt for hybridization at 42° C., and about 0.01 M to about 0.02 M salt for washing at 55° C. High stringency conditions also may include 1% BSA, 1 mM EDTA, 0.5 M NaHPO₄ (pH 7.2), 7% SDS for hybridization at 65° C., and (i) 0.2×SSC, 0.1% SDS; or (ii) 0.5% BSA, 1 mM EDTA, 40 mM NaHPO₄ (pH 7.2), 1% SDS for washing at a temperature in excess of 65° C. One embodiment of high stringency conditions includes hybridizing in 6×SSC at about 45° C., followed by one or more washes in 0.2×SSC, 0.1% SDS at 65° C.

[0130] In certain embodiments, a corresponding RO BaSIRS biomarker polynucleotide is one that hybridizes to a disclosed nucleotide sequence under very high stringency conditions. One embodiment of very high stringency conditions includes hybridizing 0.5 M sodium phosphate, 7% SDS at 65° C., followed by one or more washes at 0.2×SSC, 1% SDS at 65° C.

[0131] Other stringency conditions are well known in the art and a skilled addressee will recognize that various factors can be manipulated to optimize the specificity of the hybridization. Optimization of the stringency of the final washes can serve to ensure a high degree of hybridization. For detailed examples, see Ausubel et al., supra at pages 2.10.1 to 2.10.16 and Sambrook et al. (MOLECULAR CLONING. A LABORATORY MANUAL, Cold Spring Harbor Press, 1989) at sections 1.101 to 1.104.

[0132] Generally, a sample is processed prior to RO BaSIRS biomarker detection or quantification. For example, nucleic acid and/or proteins may be extracted, isolated, and/or purified from a sample prior to analysis. Various DNA, mRNA, and/or protein extraction techniques are well known to those skilled in the art. Processing may include centrifugation, ultracentrifugation, ethanol precipitation, filtration, fractionation, resuspension, dilution, concentration, etc. In some embodiments, methods and systems provide analysis (e.g., quantification of RNA or protein biomarkers) from raw sample (e.g., biological fluid such as blood, serum, etc.) without or with limited processing.

[0133] Methods may comprise steps of homogenizing a sample in a suitable buffer, removal of contaminants and/or assay inhibitors, adding a RO BaSIRS biomarker capture reagent (e.g., a magnetic bead to which is linked an oligonucleotide complementary to a target RO BaSIRS biomarker polynucleotide), incubated under conditions that promote the association (e.g., by hybridization) of the target biomarker with the capture reagent to produce a target biomarker:capture reagent complex, incubating the target biomarker:capture complex under target biomarker-release conditions. In some embodiments, multiple RO BaSIRS biomarkers are isolated in each round of isolation by adding multiple RO BaSIRS biomarker capture reagents (e.g., specific to the desired biomarkers) to the solution. For example, multiple RO BaSIRS biomarker capture reagents, each comprising an oligonucleotide specific for a different target RO BaSIRS biomarker can be added to the sample for isolation of multiple RO BaSIRS biomarker. It is contemplated that the methods encompass multiple experimental designs that vary both in the number of capture steps and in the number of target RO BaSIRS biomarker captured in each capture step. In some embodiments, capture reagents are molecules, moieties, substances, or compositions that preferentially (e.g., specifically and selectively) interact with a particular biomarker sought to be isolated, purified, detected, and/or quantified. Any capture reagent having desired binding affinity and/or specificity to the particular RO BaSIRS biomarker can be used in the present technology. For example, the capture reagent can be a macromolecule such as a peptide, a protein (e.g., an antibody or receptor), an oligonucleotide, a nucleic acid, (e.g., nucleic acids capable of hybridizing with the RO BaSIRS biomarkers), vitamins, oligosaccharides, carbohydrates, lipids, or small molecules, or a complex thereof. As illustrative and non-limiting examples, an avidin target capture reagent may be used to isolate and purify targets comprising a biotin moiety, an antibody may be used to isolate and purify targets comprising the appropriate antigen or epitope, and an oligonucleotide may be used to isolate and purify a complementary oligonucleotide.

[0134] Any nucleic acids, including single-stranded and double-stranded nucleic acids, that are capable of binding, or specifically binding, to a target RO BaSIRS biomarker can be used as the capture reagent. Examples of such nucleic acids include DNA, RNA, aptamers, peptide nucleic acids, and other modifications to the sugar, phosphate, or nucleoside base. Thus, there are many strategies for capturing a target and accordingly many types of capture reagents are known to those in the art.

[0135] In addition, RO BaSIRS biomarker capture reagents may comprise a functionality to localize, concentrate, aggregate, etc. the capture reagent and thus provide a way to isolate and purify the target RO BaSIRS biomarker when captured (e.g., bound, hybridized, etc.) to the capture reagent (e.g., when a target:capture reagent complex is formed). For example, in some embodiments the portion of the capture reagent that interacts with the RO BaSIRS biomarker (e.g., an oligonucleotide) is linked to a solid support (e.g., a bead, surface, resin, column, and the like) that allows manipulation by the user on a macroscopic scale. Often, the solid support allows the use of a mechanical means to isolate and purify the target:capture reagent complex from a heterogeneous solution. For example, when linked to a bead, separation is achieved by removing the bead from the heterogeneous solution, e.g., by physical movement. In embodiments in which the bead is magnetic or paramagnetic, a magnetic field is used to achieve physical separation of the capture reagent (and thus the target RO BaSIRS biomarker) from the heterogeneous solution.

[0136] The RO BaSIRS biomarkers may be quantified or detected using any suitable technique. In specific embodiments, the RO BaSIRS biomarkers are quantified using reagents that determine the level, abundance or amount of individual RO BaSIRS biomarkers. Non-limiting reagents of this type include reagents for use in nucleic acid- and protein-based assays.

[0137] In illustrative nucleic acid-based assays, nucleic acid is isolated from cells contained in the biological sample according to standard methodologies (Sambrook, et al., 1989, supra; and Ausubel et al., 1994, supra). The nucleic acid is typically fractionated (e.g., poly A⁺ RNA) or whole cell RNA. Where RNA is used as the subject of detection, it may be desired to convert the RNA to a complementary DNA. In some embodiments, the nucleic acid is amplified by a template-dependent nucleic acid amplification technique. A number of template dependent processes are available to amplify the RO BaSIRS biomarker sequences present in a given template sample. An exemplary nucleic acid amplification technique is PCR, which is described in detail in U.S. Pat. Nos. 4,683,195, 4,683,202 and 4,800,159, Ausubel et al. (supra), and in Innis et al., (“PCR Protocols”, Academic Press, Inc., San Diego Calif., 1990). Briefly, in PCR, two primer sequences are prepared that are complementary to regions on opposite complementary strands of the biomarker sequence. An excess of deoxynucleotide triphosphates are added to a reaction mixture along with a DNA polymerase, e.g., Taq polymerase. If a cognate RO BaSIRS biomarker sequence is present in a sample, the primers will bind to the biomarker and the polymerase will cause the primers to be extended along the biomarker sequence by adding on nucleotides. By raising and lowering the temperature of the reaction mixture, the extended primers will dissociate from the biomarker to form reaction products, excess primers will bind to the biomarker and to the reaction products and the process is repeated. A reverse transcriptase PCR amplification procedure may be performed in order to quantify the amount of mRNA amplified. Methods of reverse transcribing RNA into cDNA are well known and described in Sambrook et al., 1989, supra. Alternative methods for reverse transcription utilize thermostable, RNA-dependent DNA polymerases. These methods are described in WO 90/07641. Polymerase chain reaction methodologies are well known in the art. In specific embodiments in which whole cell RNA is used, cDNA synthesis using whole cell RNA as a sample produces whole cell cDNA.

[0138] In certain advantageous embodiments, the template-dependent amplification involves quantification of transcripts in real-time. For example, RNA or DNA may be quantified using the Real-Time PCR (RT-PCR) technique (Higuchi, 1992, et al., Biotechnology 10: 413-417). By determining the concentration of the amplified products of the target DNA in PCR reactions that have completed the same number of cycles and are in their linear ranges, it is possible to determine the relative concentrations of the specific target sequence in the original DNA mixture. If the DNA mixtures are cDNAs synthesized from RNAs isolated from different tissues or cells, the relative abundance of the specific mRNA from which the target sequence was derived can be determined for the respective tissues or cells. This direct proportionality between the concentration of the PCR products and the relative mRNA abundance is only true in the linear range of the PCR reaction. The final concentration of the target DNA in the plateau portion of the curve is determined by the availability of reagents in the reaction mix and is independent of the original concentration of target DNA. In specific embodiments, multiplexed, tandem PCR (MT-PCR) is employed, which uses a two-step process for gene expression profiling from small quantities of RNA or DNA, as described for example in US Pat. Appl. Pub. No. 20070190540. In the first step, RNA is converted into cDNA and amplified using multiplexed gene specific primers. In the second step each individual gene is quantitated by RT-PCR. Real-time PCR is typically performed using any PCR instrumentation available in the art. Typically, instrumentation used in real-time PCR data collection and analysis comprises a thermal cycler, optics for fluorescence excitation and emission collection, and optionally a computer and data acquisition and analysis software.

[0139] In some embodiments of RT-PCR assays, a TaqMan® probe is used for quantitating nucleic acid. Such assays may use energy transfer (“ET”), such as fluorescence resonance energy transfer (“FRET”), to detect and quantitate the synthesized PCR product. Typically, the TaqMan® probe comprises a fluorescent label (e.g., a fluorescent dye) coupled to one end (e.g., the 5′-end) and a quencher molecule is coupled to the other end (e.g., the 3′-end), such that the fluorescent label and the quencher are in close proximity, allowing the quencher to suppress the fluorescence signal of the dye via FRET. When a polymerase replicates the chimeric amplicon template to which the fluorescent labeled probe is bound, the 5′-nuclease of the polymerase cleaves the probe, decoupling the fluorescent label and the quencher so that label signal (such as fluorescence) is detected. Signal (such as fluorescence) increases with each PCR cycle proportionally to the amount of probe that is cleaved.

[0140] TaqMan® probes typically comprise a region of contiguous nucleotides having a sequence that is identically present in or complementary to a region of a RO BaSIRS biomarker polynucleotide such that the probe is specifically hybridizable to the resulting PCR amplicon. In some embodiments, the probe comprises a region of at least 6 contiguous nucleotides having a sequence that is fully complementary to or identically present in a region of a target RO BaSIRS biomarker polynucleotide, such as comprising a region of at least 8 contiguous nucleotides, at least 10 contiguous nucleotides, at least 12 contiguous nucleotides, at least 14 contiguous nucleotides, or at least 16 contiguous nucleotides having a sequence that is complementary to or identically present in a region of a target RO BaSIRS biomarker polynucleotide to be detected and/or quantitated.

[0141] In addition to the TaqMan® assays, other real-time PCR chemistries useful for detecting PCR products in the methods presented herein include, but are not limited to, Molecular Beacons, Scorpion probes and intercalating dyes, such as SYBR Green, EvaGreen, thiazole orange, YO-PRO, TO-PRO, etc. For example, Molecular Beacons, like TaqMan® probes, use FRET to detect and quantitate a PCR product via a probe having a fluorescent label (e.g., a fluorescent dye) and a quencher attached at the ends of the probe. Unlike TaqMan probes, however, Molecular Beacons remain intact during the PCR cycles. Molecular Beacon probes form a stem-loop structure when free in solution, thereby allowing the fluorescent label and quencher to be in close enough proximity to cause fluorescence quenching. When the Molecular Beacon hybridizes to a target, the stem-loop structure is abolished so that the fluorescent label and the quencher become separated in space and the fluorescent label fluoresces. Molecular Beacons are available, e.g., from Gene Link™ (see www.genelink.com/newsite/products/mbintro.asp).

[0142] In some embodiments, Scorpion probes can be used as both sequence-specific primers and for PCR product detection and quantitation. Like Molecular Beacons, Scorpion probes form a stem-loop structure when not hybridized to a target nucleic acid. However, unlike Molecular Beacons, a Scorpion probe achieves both sequence-specific priming and PCR product detection. A fluorescent label (e.g., a fluorescent dye molecule) is attached to the 5′-end of the Scorpion probe, and a quencher is attached to the 3′-end. The 3′ portion of the probe is complementary to the extension product of the PCR primer, and this complementary portion is linked to the 5′-end of the probe by a non-amplifiable moiety. After the Scorpion primer is extended, the target-specific sequence of the probe binds to its complement within the extended amplicon, thus opening up the stem-loop structure and allowing the fluorescent label on the 5′-end to fluoresce and generate a signal. Scorpion probes are available from, e.g., Premier Biosoft International (see www.premierbiosoft.com/tech_notes/Scorpion.html).

[0143] In some embodiments, labels that can be used on the FRET probes include colorimetric and fluorescent dyes such as Alexa Fluor dyes, BODIPY dyes, such as BODIPY FL; Cascade Blue; Cascade Yellow; coumarin and its derivatives, such as 7-amino-4-methylcoumarin, aminocoumarin and hydroxycoumarin; cyanine dyes, such as Cy3 and Cy5; eosins and erythrosins; fluorescein and its derivatives, such as fluorescein isothiocyanate; macrocyclic chelates of lanthanide ions, such as Quantum Dye™; Marina Blue; Oregon Green; rhodamine dyes, such as rhodamine red, tetramethylrhodamine and rhodamine 6G; Texas Red; fluorescent energy transfer dyes, such as thiazole orange-ethidium heterodimer; and, TOTAB.

[0144] Specific examples of dyes include, but are not limited to, those identified above and the following: Alexa Fluor 350, Alexa Fluor 405, Alexa Fluor 430, Alexa Fluor 488, Alexa Fluor 500. Alexa Fluor 514, Alexa Fluor 532, Alexa Fluor 546, Alexa Fluor 555, Alexa Fluor 568, Alexa Fluor 594, Alexa Fluor 610, Alexa Fluor 633, Alexa Fluor 647, Alexa Fluor 660, Alexa Fluor 680, Alexa Fluor 700, and, Alexa Fluor 750; amine-reactive BODIPY dyes, such as BODIPY 493/503, BODIPY 530/550, BODIPY 558/568, BODIPY 564/570, BODIPY 576/589, BODIPY 581/591, BODIPY 630/650, BODIPY 650/655, BODIPY FL, BODIPY R6G, BODIPY TMR, and, BODIPY-TR; Cy3, Cy5, 6-FAM, Fluorescein Isothiocyanate, HEX, 6-JOE, Oregon Green 488, Oregon Green 500, Oregon Green 514, Pacific Blue, REG, Rhodamine Green, Rhodamine Red, Renographin, ROX, SYPRO, TAMRA, 2′,4′,5′,7′-Tetrabromosulfonefluorescein, and TET.

[0145] Examples of dye/quencher pairs (i.e., donor/acceptor pairs) include, but are not limited to, fluorescein/tetramethylrhodamine; IAEDANS/fluorescein; EDANS/dabcyl; fluorescein/fluorescein; BODIPY FL/BODIPY FL; fluorescein/QSY 7 or QSY 9 dyes. When the donor and acceptor are the same, FRET may be detected, in some embodiments, by fluorescence depolarization. Certain specific examples of dye/quencher pairs (i.e., donor/acceptor pairs) include, but are not limited to, Alexa Fluor 350/Alexa Fluor488; Alexa Fluor 488/Alexa Fluor 546; Alexa Fluor 488/Alexa Fluor 555; Alexa Fluor 488/Alexa Fluor 568; Alexa Fluor 488/Alexa Fluor 594; Alexa Fluor 488/Alexa Fluor 647; Alexa Fluor 546/Alexa Fluor 568; Alexa Fluor 546/Alexa Fluor 594; Alexa Fluor 546/Alexa Fluor 647; Alexa Fluor 555/Alexa Fluor 594; Alexa Fluor 555/Alexa Fluor 647; Alexa Fluor 568/Alexa Fluor 647; Alexa Fluor 594/Alexa Fluor 647; Alexa Fluor 350/QSY35; Alexa Fluor 350/dabcyl; Alexa Fluor 488/QSY 35; Alexa Fluor 488/dabcyl; Alexa Fluor 488/QSY 7 or QSY 9; Alexa Fluor 555/QSY 7 or QSY9; Alexa Fluor 568/QSY 7 or QSY 9; Alexa Fluor 568/QSY 21; Alexa Fluor 594/QSY 21; and Alexa Fluor 647/QSY 21. In some embodiments, the same quencher may be used for multiple dyes, for example, a broad spectrum quencher, such as an Iowa Black® quencher (Integrated DNA Technologies, Coralville, Iowa) or a Black Hole Quencher™ (BHQ™; Sigma-Aldrich, St. Louis, Mo.).

[0146] In some embodiments, for example, in a multiplex reaction in which two or more moieties (such as amplicons) are detected simultaneously, each probe comprises a detectably different dye such that the dyes may be distinguished when detected simultaneously in the same reaction. One skilled in the art can select a set of detectably different dyes for use in a multiplex reaction. In some embodiments, multiple target RO BaSIRS biomarker polynucleotides are detected and/or quantitated in a single multiplex reaction. In some embodiments, each probe that is targeted to a different RO BaSIRS biomarker polynucleotide is spectrally distinguishable when released from the probe. Thus, each target RO BaSIRS biomarker polynucleotide is detected by a unique fluorescence signal.

[0147] Specific examples of fluorescently labeled ribonucleotides useful in the preparation of real-time PCR probes for use in some embodiments of the methods described herein are available from Molecular Probes (Invitrogen), and these include, Alexa Fluor 488-5-UTP, Fluorescein-12-UTP, BODIPY FL-14-UTP, BODIPY TMR-14-UTP, Tetramethylrhodamine-6-UTP, Alexa Fluor 546-14-UTP, Texas Red-5-UTP, and BODIPY TR-14-UTP. Other fluorescent ribonucleotides are available from Amersham Biosciences (GE Healthcare), such as Cy3-UTP and Cy5-UTP.

[0148] Examples of fluorescently labeled deoxyribonucleotides useful in the preparation of real-time PCR probes for use in the methods described herein include Dinitrophenyl (DNP)-1′-dUTP, Cascade Blue-7-dUTP, Alexa Fluor 488-5-dUTP, Fluorescein-12-dUTP, Oregon Green 488-5-dUTP, BODIPY FL-14-dUTP, Rhodamine Green-5-dUTP, Alexa Fluor 532-5-dUTP, BODIPY TMR-14-dUTP, Tetramethylrhodamine-6-dUTP, Alexa Fluor 546-14-dUTP, Alexa Fluor 568-5-dUTP, Texas Red-12-dUTP, Texas Red-5-dUTP, BODIPY TR-14-dUTP, Alexa Fluor 594-5-dUTP, BODIPY 630/650-14-dUTP, BODIPY 650/665-14-dUTP; Alexa Fluor 488-7-OBEA-dCTP, Alexa Fluor 546-16-OBEA-dCTP, Alexa Fluor 594-7-OBEA-dCTP, Alexa Fluor 647-12-OBEA-dCTP. Fluorescently labeled nucleotides are commercially available and can be purchased from, e.g., Invitrogen.

[0149] In certain embodiments, target nucleic acids are quantified using blotting techniques, which are well known to those of skill in the art. Southern blotting involves the use of DNA as a target, whereas Northern blotting involves the use of RNA as a target. Each provides different types of information, although cDNA blotting is analogous, in many aspects, to blotting or RNA species. Briefly, a probe is used to target a DNA or RNA species that has been immobilized on a suitable matrix, often a filter of nitrocellulose. The different species should be spatially separated to facilitate analysis. This often is accomplished by gel electrophoresis of nucleic acid species followed by “blotting” on to the filter. Subsequently, the blotted target is incubated with a probe (usually labeled) under conditions that promote denaturation and rehybridization. Because the probe is designed to base pair with the target, the probe will bind a portion of the target sequence under renaturing conditions. Unbound probe is then removed, and detection is accomplished as described above. Following detection/quantification, one may compare the results seen in a given subject with a control reaction or a statistically significant reference group or population of control subjects as defined herein. In this way, it is possible to correlate the amount of RO BaSIRS biomarker nucleic acid detected with the progression or severity of the disease.

[0150] Also contemplated are biochip-based technologies such as those described by Hacia et al. (1996, Nature Genetics 14: 441-447) and Shoemaker et al. (1996, Nature Genetics 14: 450-456). Briefly, these techniques involve quantitative methods for analyzing large numbers of genes rapidly and accurately. By tagging genes with oligonucleotides or using fixed nucleic acid probe arrays, one can employ biochip technology to segregate target molecules as high-density arrays and screen these molecules on the basis of hybridization. See also Pease et al. (1994, Proc. Natl. Acad. Sci. U.S.A. 91: 5022-5026); Fodor et al. (1991, Science 251: 767-773). Briefly, nucleic acid probes to RO BaSIRS biomarker polynucleotides are made and attached to biochips to be used in screening and diagnostic methods, as outlined herein. The nucleic acid probes attached to the biochip are designed to be substantially complementary to specific expressed RO BaSIRS biomarker nucleic acids, i.e., the target sequence (either the target sequence of the sample or to other probe sequences, for example in sandwich assays), such that hybridization of the target sequence and the probes of the present invention occur. This complementarity need not be perfect; there may be any number of base pair mismatches, which will interfere with hybridization between the target sequence and the nucleic acid probes of the present invention. However, if the number of mismatches is so great that no hybridization can occur under even the least stringent of hybridization conditions, the sequence is not a complementary target sequence. In certain embodiments, more than one probe per sequence is used, with either overlapping probes or probes to different sections of the target being used. That is, two, three, four or more probes, with three being desirable, are used to build in a redundancy for a particular target. The probes can be overlapping (i.e. have some sequence in common), or separate.

[0151] In an illustrative biochip analysis, oligonucleotide probes on the biochip are exposed to or contacted with a nucleic acid sample suspected of containing one or more RO BaSIRS biomarker polynucleotides under conditions favoring specific hybridization. Sample extracts of DNA or RNA, either single or double-stranded, may be prepared from fluid suspensions of biological materials, or by grinding biological materials, or following a cell lysis step which includes, but is not limited to, lysis effected by treatment with SDS (or other detergents), osmotic shock, guanidinium isothiocyanate and lysozyme. Suitable DNA, which may be used in the method of the invention, includes cDNA. Such DNA may be prepared by any one of a number of commonly used protocols as for example described in Ausubel, et al., 1994, supra, and Sambrook, et al., 1989, supra.

[0152] Suitable RNA, which may be used in the method of the invention, includes messenger RNA, complementary RNA transcribed from DNA (cRNA) or genomic or subgenomic RNA. Such RNA may be prepared using standard protocols as for example described in the relevant sections of Ausubel, et al. 1994, supra and Sambrook, et al. 1989, supra).

[0153] cDNA may be fragmented, for example, by sonication or by treatment with restriction endonucleases. Suitably, cDNA is fragmented such that resultant DNA fragments are of a length greater than the length of the immobilized oligonucleotide probe(s) but small enough to allow rapid access thereto under suitable hybridization conditions. Alternatively, fragments of cDNA may be selected and amplified using a suitable nucleotide amplification technique, as described for example above, involving appropriate random or specific primers.

[0154] Usually the target RO BaSIRS biomarker polynucleotides are detectably labeled so that their hybridization to individual probes can be determined. The target polynucleotides are typically detectably labeled with a reporter molecule illustrative examples of which include chromogens, catalysts, enzymes, fluorochromes, chemiluminescent molecules, bioluminescent molecules, lanthanide ions (e.g., Eu³⁴), a radioisotope and a direct visual label. In the case of a direct visual label, use may be made of a colloidal metallic or non-metallic particle, a dye particle, an enzyme or a substrate, an organic polymer, a latex particle, a liposome, or other vesicle containing a signal producing substance and the like. Illustrative labels of this type include large colloids, for example, metal colloids such as those from gold, selenium, silver, tin and titanium oxide. In some embodiments in which an enzyme is used as a direct visual label, biotinylated bases are incorporated into a target polynucleotide.

[0155] The hybrid-forming step can be performed under suitable conditions for hybridizing oligonucleotide probes to test nucleic acid including DNA or RNA. In this regard, reference may be made, for example, to NUCLEIC ACID HYBRIDIZATION, A PRACTICAL APPROACH (Homes and Higgins, eds.) (IRL press, Washington D.C., 1985). In general, whether hybridization takes place is influenced by the length of the oligonucleotide probe and the polynucleotide sequence under test, the pH, the temperature, the concentration of mono- and divalent cations, the proportion of G and C nucleotides in the hybrid-forming region, the viscosity of the medium and the possible presence of denaturants. Such variables also influence the time required for hybridization. The preferred conditions will therefore depend upon the particular application. Such empirical conditions, however, can be routinely determined without undue experimentation.

[0156] After the hybrid-forming step, the probes are washed to remove any unbound nucleic acid with a hybridization buffer. This washing step leaves only bound target polynucleotides. The probes are then examined to identify which probes have hybridized to a target polynucleotide.

[0157] The hybridization reactions are then detected to determine which of the probes has hybridized to a corresponding target sequence. Depending on the nature of the reporter molecule associated with a target polynucleotide, a signal may be instrumentally detected by irradiating a fluorescent label with light and detecting fluorescence in a fluorimeter; by providing for an enzyme system to produce a dye which could be detected using a spectrophotometer; or detection of a dye particle or a colored colloidal metallic or non-metallic particle using a reflectometer; in the case of using a radioactive label or chemiluminescent molecule employing a radiation counter or autoradiography. Accordingly, a detection means may be adapted to detect or scan light associated with the label which light may include fluorescent, luminescent, focused beam or laser light. In such a case, a charge couple device (CCD) or a photocell can be used to scan for emission of light from a probe:target polynucleotide hybrid from each location in the micro-array and record the data directly in a digital computer. In some cases, electronic detection of the signal may not be necessary. For example, with enzymatically generated color spots associated with nucleic acid array format, visual examination of the array will allow interpretation of the pattern on the array. In the case of a nucleic acid array, the detection means is suitably interfaced with pattern recognition software to convert the pattern of signals from the array into a plain language genetic profile. In certain embodiments, oligonucleotide probes specific for different RO BaSIRS biomarker polynucleotides are in the form of a nucleic acid array and detection of a signal generated from a reporter molecule on the array is performed using a ‘chip reader’. A detection system that can be used by a ‘chip reader’ is described for example by Pirrung et al. (U.S. Pat. No. 5,143,854). The chip reader will typically also incorporate some signal processing to determine whether the signal at a particular array position or feature is a true positive or maybe a spurious signal. Exemplary chip readers are described for example by Fodor et al. (U.S. Pat. No. 5,925,525). Alternatively, when the array is made using a mixture of individually addressable kinds of labeled microbeads, the reaction may be detected using flow cytometry.

[0158] In certain embodiments, the RO BaSIRS biomarker is a target RNA (e.g., mRNA) or a DNA copy of the target RNA whose level or abundance is measured using at least one nucleic acid probe that hybridizes under at least low, medium, or high stringency conditions to the target RNA or to the DNA copy, wherein the nucleic acid probe comprises at least 15 (e.g., 15, 16, 17, 18, 19, 20, 21, 22, 23, 24, 25, 26, 27, 28, 29, 30, or more) contiguous nucleotides of RO BaSIRS biomarker polynucleotide. In some embodiments, the measured level or abundance of the target RNA or its DNA copy is normalized to the level or abundance of a reference RNA or a DNA copy of the reference RNA. Suitably, the nucleic acid probe is immobilized on a solid or semi-solid support. In illustrative examples of this type, the nucleic acid probe forms part of a spatial array of nucleic acid probes. In some embodiments, the level of nucleic acid probe that is bound to the target RNA or to the DNA copy is measured by hybridization (e.g., using a nucleic acid array). In other embodiments, the level of nucleic acid probe that is bound to the target RNA or to the DNA copy is measured by nucleic acid amplification (e.g., using a polymerase chain reaction (PCR)). In still other embodiments, the level of nucleic acid probe that is bound to the target RNA or to the DNA copy is measured by nuclease protection assay.

[0159] Sequencing technologies such as Sanger sequencing, pyrosequencing, sequencing by ligation, massively parallel sequencing, also called “Next-generation sequencing” (NGS), and other high-throughput sequencing approaches with or without sequence amplification of the target can also be used to detect or quantify the presence of RO BaSIRS biomarker polynucleotides in a sample. Sequence-based methods can provide further information regarding alternative splicing and sequence variation in previously identified genes. Sequencing technologies include a number of steps that are grouped broadly as template preparation, sequencing, detection and data analysis. Current methods for template preparation involve randomly breaking genomic DNA into smaller sizes from which each fragment is immobilized to a support. The immobilization of spatially separated fragment allows thousands to billions of sequencing reaction to be performed simultaneously. A sequencing step may use any of a variety of methods that are commonly known in the art. One specific example of a sequencing step uses the addition of nucleotides to the complementary strand to provide the DNA sequence. The detection steps range from measuring bioluminescent signal of a synthesized fragment to four-color imaging of single molecule. In some embodiments in which NGS is used to detect or quantify the presence of RO BaSIRS nucleic acid biomarker in a sample, the methods are suitably selected from semiconductor sequencing (Ion Torrent; Personal Genome Machine); Helicos True Single Molecule Sequencing (tSMS) (Harris et al. 2008, Science 320:106-109); 454 sequencing (Roche) (Margulies et al. 2005, Nature, 437, 376-380); SOLiD technology (Applied Biosystems); SOLEXA sequencing (Illumina); single molecule, real-time (SMRT™) technology of Pacific Biosciences; nanopore sequencing (Soni and Meller, 2007. Clin Chem 53: 1996-2001); DNA nanoball sequencing; sequencing using technology from Dover Systems (Polonator), and technologies that do not require amplification or otherwise transform native DNA prior to sequencing (e.g., Pacific Biosciences and Helicos), such as nanopore-based strategies (e.g., Oxford Nanopore, Genia Technologies, and Nabsys).

[0160] In other embodiments, RO BaSIRS biomarker protein levels are assayed using protein-based assays known in the art. For example, when RO BaSIRS biomarker protein is an enzyme, the protein can be quantified based upon its catalytic activity or based upon the number of molecules of the protein contained in a sample. Antibody-based techniques may be employed including, for example, immunoassays, such as the enzyme-linked immunosorbent assay (ELISA) and the radioimmunoassay (RIA).

[0161] In specific embodiments, protein-capture arrays that permit simultaneous detection and/or quantification of a large number of proteins are employed. For example, low-density protein arrays on filter membranes, such as the universal protein array system (Ge, 2000 Nucleic Acids Res. 28(2):e3) allow imaging of arrayed antigens using standard ELISA techniques and a scanning charge-coupled device (CCD) detector. Immuno-sensor arrays have also been developed that enable the simultaneous detection of clinical analytes. It is now possible using protein arrays, to profile protein expression in bodily fluids, such as in sera of healthy or diseased subjects, as well as in subjects pre- and post-drug treatment.

[0162] Exemplary protein capture arrays include arrays comprising spatially addressed antigen-binding molecules, commonly referred to as antibody arrays, which can facilitate extensive parallel analysis of numerous proteins defining a proteome or subproteome. Antibody arrays have been shown to have the required properties of specificity and acceptable background, and some are available commercially (e.g., BD Biosciences, Clontech, Bio-Rad and Sigma). Various methods for the preparation of antibody arrays have been reported (see, e.g., Lopez et al., 2003 J. Chromatogram. B 787:19-27; Cahill, 2000 Trends in Biotechnology 7:47-51; U.S. Pat. App. Pub. 2002/0055186; U.S. Pat. App. Pub. 2003/0003599; PCT publication WO 03/062444; PCT publication WO 03/077851; PCT publication WO 02/59601; PCT publication WO 02/39120; PCT publication WO 01/79849; PCT publication WO 99/39210). The antigen-binding molecules of such arrays may recognize at least a subset of proteins expressed by a cell or population of cells, illustrative examples of which include growth factor receptors, hormone receptors, neurotransmitter receptors, catecholamine receptors, amino acid derivative receptors, cytokine receptors, extracellular matrix receptors, antibodies, lectins, cytokines, serpins, proteases, kinases, phosphatases, ras-like GTPases, hydrolases, steroid hormone receptors, transcription factors, heat-shock transcription factors, DNA-binding proteins, zinc-finger proteins, leucine-zipper proteins, homeodomain proteins, intracellular signal transduction modulators and effectors, apoptosis-related factors, DNA synthesis factors, DNA repair factors, DNA recombination factors and cell-surface antigens.

[0163] Individual spatially distinct protein-capture agents are typically attached to a support surface, which is generally planar or contoured. Common physical supports include glass slides, silicon, microwells, nitrocellulose or PVDF membranes, and magnetic and other microbeads.

[0164] Particles in suspension can also be used as the basis of arrays, providing they are coded for identification; systems include color coding for microbeads (e.g., available from Luminex, Bio-Rad and Nanomics Biosystems) and semiconductor nanocrystals (e.g., QDots™, available from Quantum Dots), and barcoding for beads (UltraPlex™, available from Smartbeads) and multimetal microrods (Nanobarcodes™ partiles, available from Surromed). Beads can also be assembled into planar arrays on semiconductor chips (e.g., available from LEAPS technology and BioArray Solutions). Where particles are used, individual protein-capture agents are typically attached to an individual particle to provide the spatial definition or separation of the array. The particles may then be assayed separately, but in parallel, in a compartmentalized way, for example in the wells of a microtiter plate or in separate test tubes.

[0165] In operation, a protein sample, which is optionally fragmented to form peptide fragments (see, e.g., U.S. Pat. App. Pub. 2002/0055186), is delivered to a protein-capture array under conditions suitable for protein or peptide binding, and the array is washed to remove unbound or non-specifically bound components of the sample from the array. Next, the presence or amount of protein or peptide bound to each feature of the array is detected using a suitable detection system. The amount of protein bound to a feature of the array may be determined relative to the amount of a second protein bound to a second feature of the array. In certain embodiments, the amount of the second protein in the sample is already known or known to be invariant.

[0166] In specific embodiments, the RO BaSIRS biomarker is a target polypeptide whose level is measured using at least one antigen-binding molecule that is immuno-interactive with the target polypeptide. In these embodiments, the measured level of the target polypeptide is normalized to the level of a reference polypeptide. Suitably, the antigen-binding molecule is immobilized on a solid or semi-solid support. In illustrative examples of this type, the antigen-binding molecule forms part of a spatial array of antigen-binding molecule. In some embodiments, the level of antigen-binding molecule that is bound to the target polypeptide is measured by immunoassay (e.g., using an ELISA).

[0167] All the essential reagents required for detecting and quantifying the RO BaSIRS biomarkers of the invention may be assembled together in a kit. In some embodiments, the kit comprises a reagent that permits quantification of at least one RO BaSIRS biomarker. In some embodiments the kit comprises: (i) a reagent that allows quantification (e.g., determining the level or abundance) of a first RO BaSIRS biomarker; and (ii) a reagent that allows quantification (e.g., determining the level or abundance) of a second RO BaSIRS biomarker, wherein the first and second biomarkers have a mutual correlation in respect of the absence of BaSIRS that lies within a mutual correlation range of between +0.9, and wherein a combination of respective biomarker values for the first and second RO BaSIRS biomarkers that are measured or derived for a subject has a performance value greater than or equal to a performance threshold representing the ability of the combination of the first and second RO BaSIRS biomarkers to diagnose the absence of BaSIRS, or to provide a prognosis for a non-BaSIRS condition (e.g., a SIRS condition other than BaSIRS), the performance threshold being a variance explained of at least 0.3. In some embodiments, the kit further comprises (iii) a reagent that allows quantification (e.g., determining the level or abundance) of a third RO BaSIRS biomarker; and (iv) a reagent that allows quantification (e.g., determining the level or abundance) of a fourth RO BaSIRS biomarker, wherein the third and fourth RO BaSIRS biomarkers have a mutual correlation in respect of the absence of BaSIRS that lies within a mutual correlation range of between ±0.9, and wherein a combination of respective biomarker values for the third and fourth RO BaSIRS biomarkers that are measured or derived for a subject has a performance value greater than or equal to a performance threshold representing the ability of the combination of the third and fourth RO BaSIRS biomarkers to diagnose the absence of BaSIRS, or to provide a prognosis for a non-BaSIRS condition (e.g., a SIRS condition other than BaSIRS), the performance threshold being a variance explained of at least 0.3. In some embodiments, the kit further comprises (v) a reagent that allows quantification (e.g., determining the level or abundance) of a fifth RO BaSIRS biomarker; and (vi) a reagent that allows quantification (e.g., determining the level or abundance) of a sixth RO BaSIRS biomarker, wherein the fifth and sixth RO BaSIRS biomarkers have a mutual correlation in respect of the absence of BaSIRS that lies within a mutual correlation range of between ±0.9, and wherein a combination of respective biomarker values for the fifth and sixth RO BaSIRS biomarkers that are measured or derived for a subject has a performance value greater than or equal to a performance threshold representing the ability of the combination of the fifth and sixth RO BaSIRS biomarkers to diagnose the absence of BaSIRS, or to provide a prognosis for a non-BaSIRS condition (e.g., a SIRS condition other than BaSIRS), the performance threshold being a variance explained of at least 0.3.

[0168] In the context of the present invention, “kit” is understood to mean a product containing the different reagents necessary for carrying out the methods of the invention packed so as to allow their transport and storage. Materials suitable for packing the components of the kit include crystal, plastic (polyethylene, polypropylene, polycarbonate and the like), bottles, vials, paper, envelopes and the like. Additionally, the kits of the invention can contain instructions for the simultaneous, sequential or separate use of the different components contained in the kit. The instructions can be in the form of printed material or in the form of an electronic support capable of storing instructions such that they can be read by a subject, such as electronic storage media (magnetic disks, tapes and the like), optical media (CD-ROM, DVD) and the like. Alternatively or in addition, the media can contain Internet addresses that provide the instructions.

[0169] Reagents that allow quantification of a RO BaSIRS biomarker include compounds or materials, or sets of compounds or materials, which allow quantification of the RO BaSIRS biomarker. In specific embodiments, the compounds, materials or sets of compounds or materials permit determining the expression level of a gene (e.g., RO BaSIRS biomarker gene), including without limitation the extraction of RNA material, the determination of the level of a corresponding RNA, etc., primers for the synthesis of a corresponding cDNA, primers for amplification of DNA, and/or probes capable of specifically hybridizing with the RNAs (or the corresponding cDNAs) encoded by the genes, TaqMan probes, etc.

[0170] The kits may also optionally include appropriate reagents for detection of labels, positive and negative controls, washing solutions, blotting membranes, microtiter plates, dilution buffers and the like. For example, a nucleic acid-based detection kit may include (i) a RO BaSIRS biomarker polynucleotide (which may be used as a positive control), (ii) a primer or probe that specifically hybridizes to a RO BaSIRS biomarker polynucleotide. Also included may be enzymes suitable for amplifying nucleic acids including various polymerases (reverse transcriptase, Taq, Sequenase™, DNA ligase etc. depending on the nucleic acid amplification technique employed), deoxynucleotides and buffers to provide the necessary reaction mixture for amplification. Such kits also generally will comprise, in suitable means, distinct containers for each individual reagent and enzyme as well as for each primer or probe. Alternatively, a protein-based detection kit may include (i) a RO BaSIRS biomarker polypeptide (which may be used as a positive control), (ii) an antibody that binds specifically to a RO BaSIRS biomarker polypeptide. The kit can also feature various devices (e.g., one or more) and reagents (e.g., one or more) for performing one of the assays described herein; and/or printed instructions for using the kit to quantify the expression of a RO BaSIRS biomarker gene and/or carry out an indicator-determining method, as broadly described above and elsewhere herein.

[0171] The reagents described herein, which may be optionally associated with detectable labels, can be presented in the format of a microfluidics card, a chip or chamber, a microarray or a kit adapted for use with the assays described in the examples or below, e.g., RT-PCR or Q PCR techniques described herein.

[0172] The reagents also have utility in compositions for detecting and quantifying the biomarkers of the invention. For example, a reverse transcriptase may be used to reverse transcribe RNA transcripts, including mRNA, in a nucleic acid sample, to produce reverse transcribed transcripts, including reverse transcribed mRNA (also referred to as “cDNA”). In specific embodiments, the reverse transcribed mRNA is whole cell reverse transcribed mRNA (also referred to herein as “whole cell cDNA”). The nucleic acid sample is suitably derived from components of the immune system, representative examples of which include components of the innate and adaptive immune systems as broadly discussed for example above. In specific embodiments, the reverse transcribed RNA is derived blood cells (e.g., peripheral blood cells). Suitably, the reverse transcribed RNA is derived leukocytes.

[0173] The reagents are suitably used to quantify the reverse transcribed transcripts. For example, oligonucleotide primers that hybridize to the reverse transcribed transcript can be used to amplify at least a portion of the reverse transcribed transcript via a suitable nucleic acid amplification technique, e.g., RT-PCR or qPCR techniques described herein. Alternatively, oligonucleotide probes may be used to hybridize to the reverse transcribed transcript for the quantification, using a nucleic acid hybridization analysis technique (e.g., microarray analysis), as described for example above. Thus, in some embodiments, a respective oligonucleotide primer or probe is hybridized to a complementary nucleic acid sequence of a reverse transcribed transcript in the compositions of the invention. The compositions typically comprise labeled reagents for detecting and/or quantifying the reverse transcribed transcripts. Representative reagents of this type include labeled oligonucleotide primers or probes that hybridize to RNA transcripts or reverse transcribed RNA, labeled RNA, labeled reverse transcribed RNA as well as labeled oligonucleotide linkers or tags (e.g., a labeled RNA or DNA linker or tag) for labeling (e.g., end labeling such as 3′ end labeling) RNA or reverse transcribed RNA. The primers, probes, RNA or reverse transcribed RNA (i.e., cDNA) (whether labeled or non-labeled) may be immobilized or free in solution. Representative reagents of this type include labeled oligonucleotide primers or probes that hybridize to reverse transcribed and transcripts as well as labeled reverse transcribed transcripts. The label can be any reporter molecule as known in the art, illustrative examples of which are described above and elsewhere herein.

[0174] The present invention also encompasses non-reverse transcribed RNA embodiments in which cDNA is not made and the RNA transcripts are directly the subject of the analysis. Thus, in other embodiments, reagents are suitably used to quantify RNA transcripts directly. For example, oligonucleotide probes can be used to hybridize to transcripts for quantification of immune system biomarkers of the invention, using a nucleic acid hybridization analysis technique (e.g., microarray analysis), as described for example above. Thus, in some embodiments, a respective oligonucleotide probe is hybridized to a complementary nucleic acid sequence of an immune system biomarker transcript in the compositions of the invention. In illustrative examples of this type, the compositions may comprise labeled reagents that hybridize to transcripts for detecting and/or quantifying the transcripts. Representative reagents of this type include labeled oligonucleotide probes that hybridize to transcripts as well as labeled transcripts. The primers or probes may be immobilized or free in solution.

[0175] The present invention also extends to the management of SIRS, or prevention of progression to SIRS with at least one clinical sign of SIRS. A subject positively identified as having an absence of BaSIRS is either not exposed to treatment or exposed to a non-BaSIRS treatment, including a treatment for SIRS conditions other than BaSIRS, such as but not limited to, a treatment for ADaSIRS, CANaSIRS, TRAUMaSIRS, ANAPHYLaSIRS, SCHIZaSIRS or VaSIRS. Representative treatments of this type typically include administration of vasoactive compounds, steroids, anti tumour necrosis factor agents, recombinant protein C and anti-viral compounds such as Aciclovir, Brivudine, Cidofovir, Famciclovir, Fomivirsen, Foscarnet, Ganciclovir, HDP-CDV, Idoxuridine, Letermovir, Maribavir, Penciclovir, Resiquimod, Sorivudine, Trifluridine, Tromantadine, Valaciclovir, Valganciclovir, Vidarabine or salts and combinations thereof. Non-limiting therapies for non-bacterium associated SIRS conditions are disclosed for example by Healy (2002, Ann. Pharmacother. 36(4): 648-54) and Brindley (2005, CJEM. 7(4): 227) and Jenkins (2006, J Hosp Med. 1(5): 285-295). In representative embodiments in which BaSIRS is ruled out, the subject is not exposed to antibiotics.

[0176] Typically, the therapeutic agents will be administered in pharmaceutical (or veterinary) compositions together with a pharmaceutically acceptable carrier and in an effective amount to achieve their intended purpose. The dose of active compounds administered to a subject should be sufficient to achieve a beneficial response in the subject over time such as a reduction in, or relief from, the symptoms of BaSIRS. The quantity of the pharmaceutically active compounds(s) to be administered may depend on the subject to be treated inclusive of the age, sex, weight and general health condition thereof. In this regard, precise amounts of the active compound(s) for administration will depend on the judgment of the practitioner. In determining the effective amount of the active compound(s) to be administered in the treatment or prevention of BaSIRS, the medical practitioner or veterinarian may evaluate severity of any symptom or clinical sign associated with the presence of BaSIRS or degree of BaSIRS including, inflammation, blood pressure anomaly, tachycardia, tachypnea fever, chills, vomiting, diarrhea, skin rash, headaches, confusion, muscle aches, seizures. In any event, those of skill in the art may readily determine suitable dosages of the therapeutic agents and suitable treatment regimens without undue experimentation.

[0177] The therapeutic agents may be administered in concert with adjunctive (palliative) therapies to increase oxygen supply to major organs, increase blood flow to major organs and/or to reduce the inflammatory response. Illustrative examples of such adjunctive therapies include non-steroidal-anti-inflammatory drugs (NSAIDs), intravenous saline and oxygen.

[0178] The present invention also contemplates the use of the indicator-determining methods, apparatus, compositions and kits disclosed herein in methods for managing a subject with at least one clinical sign of SIRS. These methods (also referred to herein as “management methods”) generally comprise not exposing the subject to a treatment regimen for specifically treating BaSIRS based on an indicator obtained from an indicator-determining method, wherein the indicator is indicative of the absence of BaSIRS in the subject, and of ruling out the likelihood of the presence of BaSIRS in the subject, and wherein the indicator-determining method is an indicator-determining method as broadly described above and elsewhere herein. In specific embodiments, the management methods comprise: (a) determining a plurality of biomarker values, each biomarker value being indicative of a value measured or derived for at least two (e.g., 2, 3, 4, 5, 6, 7, 8, 9, 10, or more) RO BaSIRS biomarker of the subject; (b) determining an indicator using a combination of the plurality of biomarker values, the indicator being at least partially indicative of the absence of BaSIRS, wherein: (i) at least two (e.g., 2, 3, 4, 5, 6, 7, 8, 9, 10, or more) RO BaSIRS biomarkers have a mutual correlation in respect of the absence of BaSIRS that lies within a mutual correlation range, the mutual correlation range being between +0.9; and (ii) the indicator has a performance value greater than or equal to a performance threshold representing the ability of the indicator to diagnose the absence of BaSIRS, the performance threshold being indicative of an explained variance of at least 0.3; and (c) not exposing the subject to a treatment regimen for specifically treating BaSIRS and/or exposing the subject to a non-BaSIRS treatment, or not exposing the subject to a treatment.

[0179] In advantageous embodiments, the management methods comprise: (1) determining a plurality of measured biomarker values, each measured biomarker value being a measured value of a RO BaSIRS biomarker of the subject; and (2) applying a function to at least one of the measured biomarker values to determine at least one derived biomarker value, the at least one derived biomarker value being indicative of a value of a corresponding derived RO BaSIRS biomarker. The function suitably includes at least one of: (a) multiplying two biomarker values; (b) dividing two biomarker values; (c) adding two biomarker values; (d) subtracting two biomarker values; (e) a weighted sum of at least two biomarker values; (f) a log sum of at least two biomarker values; and (g) a sigmoidal function of at least two biomarker values.

[0180] The present invention also contemplates methods in which the indicator-determining method of the invention is implemented using one or more processing devices. In some embodiments, these methods comprise: (1) determining a pair of biomarker values, the pair of biomarker values being selected from the group consisting of: (a) a first pair of biomarker values indicative of a concentration of polynucleotide expression products of a Group A RO BaSIRS biomarker gene (e.g., DIAPH2) and a Group B RO BaSIRS biomarker gene (e.g., SERTAD2); and (b) a second pair of biomarker values indicative of a concentration of polynucleotide expression products of a Group C RO BaSIRS biomarker gene (e.g., PARL) gene and a Group D RO BaSIRS biomarker gene (e.g., PAFAH2); and (c) a third pair of biomarker values indicative of a concentration of polynucleotide expression products of a Group E RO BaSIRS biomarker gene (e.g., SORT1) gene and a Group F RO BaSIRS biomarker gene (e.g., OSBPL9); (2) determining an indicator indicative of a ratio of the concentrations of the polynucleotide expression products using all three biomarker values; (3) retrieving previously determined first, second and third indicator references from a database, the first, second and third indicator references being determined based on indicators determined from first, second and third groups of a reference population, one of the groups consisting of individuals diagnosed with a non-BaSIRS SIRS condition; (4) comparing the indicator to the first, second and third indicator references; (5) using the results of the comparison to determine a probability indicative of the subject having or not having BaSIRS; and (6) generating a representation of the probability, the representation being displayed to a user to allow the user to assess the likelihood of a biological subject having an absence of BaSIRS or not.

[0181] Similarly apparatus can be provided for determining the likelihood of a subject having an absence of BaSIRS, the apparatus including: (A) a sampling device that obtains a sample taken from a subject, the sample including polynucleotide expression products; (B) a measuring device that quantifies polynucleotide expression products within the sample to determine three biomarker values, the three biomarker values being selected from the group consisting of: (a) a first pair of biomarker values indicative of a concentration of polynucleotide expression products of a Group A RO BaSIRS biomarker gene (e.g., DIAPH2) and a Group B RO BaSIRS biomarker gene (e.g., SERTAD2); and (b) a second pair of biomarker values indicative of a concentration of polynucleotide expression products of a Group C RO BaSIRS biomarker gene (e.g., PARL) gene and a Group D RO BaSIRS biomarker gene (e.g., PAFAH2); and (c) a third pair of biomarker values indicative of a concentration of polynucleotide expression products of a Group E RO BaSIRS biomarker gene (e.g., SORT1) gene and a Group F RO BaSIRS biomarker gene (e.g., OSBPL9); (C) at least one processing device that: (i) receives an indication of the pair of biomarker values from the measuring device; (ii) determines an indicator using a ratio of the concentration of the first, second and third polynucleotide expression products using the biomarker values; (iii) compares the indicator to at least one indicator reference; (iv) determines a likelihood of the subject having or not having BaSIRS condition using the results of the comparison; and (v) generates a representation of the indicator and the likelihood for display to a user.

[0182] The present invention also encompasses methods for differentiating between BaSIRS and another SIRS other than BaSIRS in a subject. These methods suitably comprise: (a) obtaining a sample taken from a subject showing a clinical sign of SIRS, the sample including polynucleotide expression products; (b) in a measuring device: (i) amplifying at least some polynucleotide expression products in the sample; (ii) determining an amplification amount representing a degree of amplification required to obtain a defined level of polynucleotide expression products including: amplification amounts for a first pair of polynucleotide expression products of of a Group A RO BaSIRS biomarker gene (e.g., DIAPH2) and a Group B RO BaSIRS biomarker gene (e.g., SERTAD2); and amplification amounts for a second pair of polynucleotide expression products of a Group C RO BaSIRS biomarker gene (e.g., PARL) gene and a Group D RO BaSIRS biomarker gene (e.g., PAFAH2); and amplification amounts for a third pair of polynucleotide expression products of a Group E RO BaSIRS biomarker gene (e.g., SORT1) gene and a Group F RO BaSIRS biomarker gene (e.g., OSBPL9); (c) in a processing system: (i) retrieving the amplification amounts; (ii) determining an indicator by: determining a first derived biomarker value indicative of a ratio of concentrations of the first pair of polynucleotide expression products by determining a difference between the amplification amounts for the first pair; determining a second derived biomarker value indicative of a ratio of concentrations of the second pair of polynucleotide expression products by determining a difference between the amplification amounts for the second pair; determining a third derived biomarker value indicative of a ratio of concentrations of the third pair of polynucleotide expression products by determining a difference between the amplification amounts for the third pair; (d) determining the indicator by adding the first, second and third derived biomarker values; (e) retrieving previously determined first, second and third indicator references from a database, wherein the first, second and third indicator references are distributions of indicators determined for first and second groups of a reference population, the first and second groups consisting of individuals diagnosed with BaSIRS and SIRS conditions other than BaSIRS, respectively; (f) comparing the indicator to the first and second indicator references; (g) using the results of the comparison to determine a probability of the subject being classified within the first or second group; (h) generating a representation at least partially indicative of the indicator and the probability; and (i) providing the representation to a user to allow the user to assess the likelihood of a subject having or not having BaSIRS or the other SIRS condition.

[0183] Additionally, methods can be provided for determining an indicator used in assessing a likelihood of a subject having an absence of BaSIRS. These methods suitably include: (1) determining a plurality of biomarker values, each biomarker value being indicative of a value measured or derived for at least one corresponding RO BaSIRS biomarker of the subject and being at least partially indicative of a concentration of the RO BaSIRS biomarker in a sample taken from the subject; (2) determining the indicator using a combination of the plurality of biomarker values, wherein: at least two biomarkers have a mutual correlation in respect of an absence of BaSIRS that lies within a mutual correlation range, the mutual correlation range being between 0.9; and the indicator has a performance value greater than or equal to a performance threshold representing the ability of the indicator to diagnose the absence of BaSIRS, the performance threshold being indicative of an explained variance of at least 0.3.

[0184] In order that the invention may be readily understood and put into practical effect, particular preferred embodiments will now be described by way of the following non-limiting examples.

### EXAMPLES

### Example 1

### Groups A, B, C, D, E and F Biomarkers. Biomarkers are Grouped Based on their Correlation to DIAPH2, SERTAD2, PARL, PAFAH2, SORT1 AND OSBPL9

[0185] Three pairs of derived biomarkers (DIAPH2/SERTAD2; PARL/PAFAH2; SORT1/OSBPL9) were discovered that provided the highest AUC across all of bacterial datasets studied. Biomarkers were then allocated to one of six Groups, as individual biomarkers, based on their correlation to either DIAPH2 (Group A), SERTAD2 (Group B), PARL (Group C), PAFAH2 (Group D), SORT1 (Group E) or OSBPL9 (Group F), as presented in Table 5. Calculated Negative Predictive Values (NPV) and Areas Under Curve (AUC) for 200 derived biomarkers at a set BaSIRS prevalence of 10% and 5% are presented in Table 6 and Table 7. The NPV of these 200 derived biomarkers increases as the prevalence of BaSIRS decreases, so all those listed would perform well in an emergency room setting where the prevalence of BaSIRS is estimated to be closer to 4%.

### Example 2

### Ro BaSIRS Biomarker Derivation (Derived Biomarkers)

[0186] An illustrative process for the identification of emergency room (ER) RO BaSIRS biomarkers for use in diagnostic algorithms will now be described.

[0187] Using publicly available datasets (from Gene Expression Omnibus, GEO) the aim was to find specific biomarkers that differentiated between those subjects with BaSIRS and those subjects that are either healthy, have a known viral infection, or have other known non-bacterial inflammation. First, biomarkers with strong diagnostic potential were generated that were able to differentiate BaSIRS and healthy subjects (Set A biomarkers)—see Table 1 for a list of the GEO datasets used to generate these biomarkers. Secondly, biomarkers with strong diagnostic potential were generated that were able to differentiate BaSIRS and subjects with non-bacterial systemic inflammation, including viral infection, autoimmune disease and trauma (Set B biomarkers)—see Table 2 for a list of the GEO datasets used to generate these biomarkers. Thirdly, biomarkers with diagnostic potential were generated that were able to differentiate non-bacterial systemic inflammation and healthy subjects (Set C biomarkers). Set A and B biomarkers were then pooled, since they are able to differentiate BaSIRS from other infections and systemic inflammation, and Set C biomarkers were subtracted from this pool. Thus, the formula for generating RO BaSIRS-specific biomarkers in this instance was (A+B)−C.

[0188] A list of the public datasets used to generate biomarker Sets A, B and C can be found in Tables 1 and 2. Each of the public datasets were quality control screened prior to inclusion in each Set to ensure that no artifacts existed (such as batch effect). The primary tool used to determine the quality of each dataset was Principal Component Analysis (PCA).

[0189] Once appropriate datasets had been selected a search for derived biomarkers (as a ratio) was implemented. For inclusion in biomarker Sets A and B the derived biomarkers were required to obtain a significant Area Under Curve (AUC) in each of the eight RO BaSIRS datasets individually (rather than including any derived biomarker that reached a significant AUC in any dataset). The total number of derived biomarkers considered initially in Sets A and B was over 18 million. For inclusion in biomarker Set C the derived biomarkers were required to obtain an Area Under Curve (AUC) higher than 0.8.

[0190] Following selection of derived biomarkers in Sets A, B and C the derived biomarkers in Set C were taken from the pool of derived biomarkers that made up Sets A and B (12,379,842 ratios). That is, the formula (A+B)−C was performed. Table 2 shows the percent overlap of significant derived biomarkers for each dataset in Set C when compared to the derived biomarkers that made up Sets A and B. The largest overlap with RO BaSIRS derived biomarkers was found between significant derived biomarkers found in major trauma (55%). Such overlap was to be expected since it has been published that major trauma causes a “genomic storm” response in gene expression changes in peripheral blood (Xiao, W., Mindrinos, M. N., Seok, J., Cuschieri, J., Cuenca, A. G., Gao, H., et al. (2011). A genomic storm in critically injured humans. Journal of Experimental Medicine, 208(13), 2581-2590). After only allowing ratios in the clinical datasets above an AUC of 0.8 and then subtraction of the C ratios, only 111929 derived biomarkers remained (of 12 million). Thus, it can be considered that these remaining derived biomarkers are specific to BaSIRS in a heterogenous SIRS patient population with low prevalence of BaSIRS. Such specificity to BaSIRS provides strong negative predictive value, or an ability to rule out BaSIRS. The AUC of the best single derived biomarker in this final set was 0.896 (SORT1/CD81).

[0191] With respect to host response markers, a non-limiting example of how biomarkers were identified will now be described. For the purpose of illustration and in general, the process as described in Australian Provisional Patent Application number AU2014900363 (“Biomarker signature method and apparatus and kits therefor”) was used to select biomarkers that provided the theoretical best diagnostic biomarkers, selected from combinations including measured and/or derived biomarkers using publicly available datasets (Gene Expression Omnibus, GEO) that contain patient cohorts of known status, including bacterial infection, non-bacterial inflammation and healthy conditions; GSE30119, GSE33341, GSE16129, GSE25504, GSE40586, GSE6269, GSE40012, GSE40396, GSE17755, GSE19301, GSE35846, GSE36809, GSE38485, GSE47655 and GSE52428. All datasets used fitted the following criteria; peripheral blood samples were used, appropriate controls were used, an appropriate number of samples were used to provide significance following False-Discovery Rate (FDR) adjustment, all data passed standard quality control metrics, principle component analysis did not reveal any artifacts or potential biases. As a first step biomarkers and derived biomarkers with good performance (mean Under Curve, AUC >0.8 across all bacterial infection datasets) for separating cohorts with known bacterial infection from non-bacterial inflammation and from healthy were selected. Secondly, biomarkers and derived biomarkers with good performance (any biomarker with an AUC >0.78 for separating cohorts with known non-bacterial inflammation and from healthy were selected. The latter were then subtracted from the former to ensure that the remaining biomarkers and derived biomarkers were specific to bacterial infection. In total, over 12 million ratio combinations were generated in the first step resulted in ˜4000 ratios that hold valuable information in the diagnosis of BaSIRS vs non-bacterial SIRS in an ED cohort. To further reduce number of biomarkers and to reduce the collinearity in the system, a between-ratio correlation cutoff of 0.7 was used which resulted in 200 final ratios following subtraction and filtering steps. Using machine learning methods the best combinations of biomarkers and derived biomarkers was then determined.

[0192] The performance of the top three derived biomarkers, singly and in combination, that are best capable of separating BaSIRS and non-bacterial SIRS are shown in the FIGS. 1, 2, 3 and 5. Additional lists of top performing derived biomarkers (as measured by AUC and NPV) are also presented in Table 6 and Table 7.

### Example 3

### RO BaSIRS Biomarker Derivation (Combination of Derived Biomarkers)

[0193] Following filtering out of derived biomarkers non-specific to BaSIRS various machine learning methods were applied to identify the optimal combination of derived biomarkers that provided the greatest AUC. Machine learning methods used included; random forests, support vector machines, logistic regression and greedy forward selection. After applying all of these methods individually it was found that they all performed equally well when restricting the model to the use of five derived biomarkers or less. This latter restriction was applied for practicality and to ensure ability to reduce the biomarkers to a working assay. Ultimately greedy forward selection was used, which resulted in a number of sets of derived biomarkers with high AUCs (see FIG. 4).

[0194] Following the application of the greedy search algorithm the top three derived biomarker combinations identified were DIAPH2/SERTAD2; PARL/PAFAH2; SORT1/OSBPL9. The combination of these three biomarker ratios gave an AUC of 0.94 for separating BaSIRS from non-BaSIRS SIRS conditions, which was considered to be the minimal set of derived biomarkers with optimal commercial utility. Optimal commercial utility in this instance means consideration of the following non-limiting factors; diagnostic performance, clinical utility, diagnostic noise (introduced by using too many derived biomarkers), transferability to available molecular chemistries (e.g., PCR, microarray, DNA sequencing), transferability to available point-of-care platforms (e.g. Biocartis Idylla, Cepheid GeneXpert, Becton Dickinson BD Max, Curetis Unyvero, Oxford Nanopore Technologies MinION), cost of assay manufacture (the more reagents and biomarkers the larger the cost), ability to multiplex biomarkers, availability of suitable reporter dyes, complexity of results interpretation.

### Example 4

### RO BaSIRS Biomarker Performance (Derived Biomarkers and Combined Derived Biomarkers)

[0195] The performance (AUC and NPV) of the top 200 derived biomarkers at a defined BaSIRS prevalence of 10% and 5% is shown in Table 6 and Table 7. The NPV of each of these derived biomarkers in practice could possibly be higher than that shown in these tables because the prevalence of suspected BaSIRS in emergency rooms has been shown to be approximately 4% (Niska, R., Bhuiya, F., & Xu, J. (2010). National hospital ambulatory medical care survey: 2007 emergency department summary. Natl Health Stat Report, 26(26), 1-31). The lower the prevalence the higher the NPV of these derived biomarkers.

[0196] Following a greedy search the best performing individual derived biomarker was DIAPH2/SERTAD2 with an AUC of 0.863. The best second unique derived biomarker to add to the first derived biomarker was PARL/PAFAH2. The AUC obtained across the normalized dataset using these two derived biomarkers was 0.92, an 0.057 improvement over the use of a single derived biomarker. The addition of a third derived biomarker (SORT1/OSBPL9) improved the AUC by 0.02 to 0.94 (AUC ROC plots for these derived biomarkers are shown in FIG. 1). It is possible that the addition of more derived biomarkers created overfitting and noise (see FIG. 4). Thus, it was considered that the optimal commercial RO BaSIRS signature consists of the following three derived biomarkers: DIAPH2/SERTAD2; PARL/PAFAH2; SORT1/OSBPL9.

[0197] FIG. 2, FIG. 3 and FIG. 5 show plots demonstrating the performance of the top three derived biomarkers in each of the RO BaSIRS datasets, in the RO BaSIRS datasets combined, and in a dataset consisting of samples collected from a clinical trial performed by the applicants respectively. This latter dataset involved collecting samples from patients presenting to emergency with fever.

### Example 5

### RO BaSIRS Biomarker Profiles (Grouping)

[0198] The BaSIRS biomarker profiles can be grouped into derived biomarkers and combinations of derived biomarkers.

[0199] There are six biomarkers in the best performing three derived biomarker signature: DIAPH2/SERTAD2; PARL/PAFAH2; SORT1/OSBPL9, 102 derived biomarkers with an NPV >0.95 (prevalence 10%) and 179 unique biomarkers. For each unique biomarker, a correlation coefficient was calculated. Table 5 lists 179 unique biomarkers and their correlation to each of the six biomarkers in the top performing three-derived biomarker signature. Each set of biomarkers make up Groups A, B, C, D, E and F respectively.

[0200] The best combination of derived biomarkers was determined to be: DIAPH2/SERTAD2; PARL/PAFAH2; SORT1/OSBPL9 (Group G).

### Example 6

### Analysis of Derived Biomarkers

[0201] Performance (AUC and NPV) of 200 derived biomarkers at a set prevalence of 10% is shown in Table 6, and of these, 102 have NPV greater than 0.95. Performance of DIAPH2/SERTAD2; PARL/PAFAH2; SORT1/OSBPL9 across each of the BaSIRS datasets is shown in FIG. 2. Performance of DIAPH2/SERTAD2; PARL/PAFAH2 and SORT1/OSBPL9 are shown in FIGS. 1 and 3.

[0202] Numerators and denominators that appear more than once in the top 200 derived biomarkers are listed in Table 9. The two most common numerators include TLR5 and MMP8, and the two most common denominators include ILR7 and CCND2.

### Example 7

### Validation of Derived Biomarkers in an Independent Dataset

[0203] A dataset used for validation also satisfied the conditions stated above and was derived from a clinical trial within an ED based at University College London. Patients (n=36) were included in they presented with fever (FIG. 5a). Retrospective clinical microbiology results were used to categorize subjects into three groups, including: positive microbiology from a sterile site, positive virology, negative microbiology (and not on antibiotics). FIG. 5a presents a box and whisker plot using the combined derived biomarkers of DIAPH2/SERTAD2; PARL/PAFAH2 and SORT1/OSBPL9 on this patient population. The AUC between patients with positive microbiology and all others (viral positive and negative microbiology) was 0.904 in this validation set. FIGS. 5b and 5c represent box and whisker plots for two signatures validated in an expanded patient cohort from the same independent clinical trial involving patients presenting to an ED at University College London (see FIGS. 5b and 5c). Patients (n=59) were included in they presented with fever and were admitted to hospital. Retrospective clinical microbiology results were used to categorize subjects into three groups, including: positive microbiology from a sterile site (“bacterial, n=32), positive virology (“viral”, n=14), negative microbiology, not on antibiotics and recovered without incident (“No positive micro, no Abx”, n=13). Only those patients suspected of having a viral infection were tested for viruses using either PCR or serology. FIGS. 5b and 5c present a box and whisker plots using the combined derived biomarkers of a) DIAPH2/SERTAD2; PARL/PAFAH2 and SORT1/OSBPL9 or, b) DIAPH2/IL7R; GBP2/GIMAP4; TLR5/FGL2 on this patient population. Performance of individual ratios in each of these signatures can be found in Table 6. This patient population does not fully represent the intended use of the RO BaSIRS since the patients were all admitted to hospital with a clinical suspicion of infection. However, the AUCs between “bacterial” vs “viral” and “bacterial” vs “indeterminate” for signatures a and b were respectively; 0.79, 0.65 and 0.93, 0.83. Negative Predictive Values (NPV) for bacterial vs other for signatures a and b were 0.975 and 0.978 respectively at a sepsis prevalence of 4%. A better patient cohort to truly test the clinical utility of the RO BaSIRS biomarkers would be to compare those patients that had an initial suspicion of infection but were not admitted to hospital (and were not admitted at a later date) to those that were admitted that had a confirmed diagnosis of BaSIRS.

### Example 8

### Example Applications of RO BaSIRS Biomarker Profiles

[0204] Use of the above described biomarkers and resulting RO BaSIRS biomarker profiles in patient populations and benefits in respect of differentiating various conditions, will now be described.

[0205] An assay capable of excluding BaSIRS in patients presenting to emergency departments can be used to help appropriately triage such patients (to ensure appropriate management, therapy and procedures are employed), as part of efforts to ensure judicious use of antibiotic and anti-viral compounds, and determination of the aetiology of systemic inflammation when due to a bacterial infection.

### Example Use of SeptiCyte Triage in an ED Patient Population

[0206] In 2010, approximately 130 million people presented to emergency departments in the USA and the third most common primary reason for the visit was fever (5.6 million people had a fever (>38° C.) and for 5 million people it was the primary reason for the visit) (Niska R, Bhuiya F, Xu J (2010) National hospital ambulatory medical care survey: 2007 emergency department summary. Natl Health Stat Report 26: 1-31). Of those patients with a fever, 664,000 had a fever of unknown origin—that is, the cause of the fever was not obvious at presentation. However, fever as a presenting clinical sign has a reasonable correlation to a final diagnosis of the presence of an infection (van Laar, P. J., & Cohen, J. (2003). A prospective study of fever in the accident and emergency department. Clinical Microbiology and Infection: the Official Publication of the European Society of Clinical Microbiology and Infectious Diseases, 9(8), 878-880; Manning, L. V., & Touquet, R. (1988). The relevance of pyrexia in adults as a presenting symptom in the accident and emergency department. Archives of Emergency Medicine, 5(2), 86-90). As such, in patients presenting to emergency with a fever, it is important to rule out an infection so that unnecessary procedures (including admission), diagnostic tests and therapies are not performed or administered. By example, as part of diagnosing the reason for the emergency department visit in 2010 in the USA, 48,614,000 complete blood counts (CBC) were performed and 5.3 million blood cultures were taken. In 3.65 million patients presenting the primary diagnosis was “infectious” and in approximately 25% of cases (32.4 million) antibiotics were administered. 13.5% of all people presenting to emergency were admitted to hospital. Clinicians in emergency need to determine the answer to a number of questions quickly, including: what is the reason for the visit, is the reason for the visit an infection, does the patient need to be admitted? The diagnosis, treatment and management of patients with a fever, BaSIRS or SIRS due to other causes are different. By way of example, a patient with a fever without other systemic inflammation clinical signs, negative for BaSIRS, and no obvious source of bacterial infection may be sent home, or provided with other non-hospital services, without further hospital treatment. However, a patient with a fever may have early BaSIRS, and not admitting such a patient and aggressively treating with antibiotics may put their life at risk.

[0207] The difference in the number of patients presenting to emergency that are ultimately diagnosed with an “infection” (3.65 million) and the number treated with antibiotics (32.4 million) suggests the following; 1) diagnostic tools that determine the presence or absence of an infection are not available, or are not being used, or are not accurate enough, or do not provide strong enough negative predictive value, or are not providing accurate information that can be acted on within a reasonable timeframe 2) when it comes to suspected infection, and because of the acute nature of infections, clinicians err on the side of caution by administering antibiotics. Further, in a study performed in the Netherlands on patients presenting to emergency with fever, 36.6% of patients admitted to hospital had a suspected bacterial infection (that is, it was not confirmed) (Limper M, Eeftinck Schattenkerk D, de Kruif Md., van Wissen M, Brandjes D P M, et al. (2011) One-year epidemiology of fever at the Emergency Department. Neth J Med 69: 124-128). This suggests that a large proportion of patients presenting to emergency are admitted to hospital without a diagnosis. The biomarkers and derived biomarkers outlined in this patent can identify those SIRS patients with a bacterial infection from those without a bacterial infection with high negative predictive value, assisting medical practitioners in triaging patients presenting with fever or other clinical signs of systemic inflammation. Such effective triage tools make best use of scarce hospital resources, including staff, equipment and therapies. Accurate triage decision-making also ensures that patients requiring hospital treatment are given it, and those that don't are provided with other appropriate services.

### Excluding BaSIRS in the Immunocompromised and Neutropenic

[0208] Patients on chemotherapy/immunosuppressants for the management of tumors or transplants are often immunocompromised and/or develop a neutropenia, with or without fever. Such patients are often outpatients and present to emergency departments with clinical signs of SIRS. Such patients need to be managed carefully and it is important to be able to diagnose or exclude the presence of microbial and opportunistic infections so that appropriate therapies and procedures can be implemented in the shortest possible time (de Naurois, J., Novitzky-Basso, I., Gill, M. J., Marti, F. M., Cullen, M. H., Roila, F., On behalf of the ESMO Guidelines Working Group. (2010). Management of febrile neutropenia: ESMO Clinical Practice Guidelines. Annals of Oncology, 21(Supplement 5), v252-v256; Kasiske, B. L., Vazquez, M. A., Harmon, W. E., Brown, R. S., Danovitch, G. M., Gaston, R. S., et al. (2000, October). Recommendations for the outpatient surveillance of renal transplant recipients. American Society of Transplantation. Journal of the American Society of Nephrology, 11, S1-S86). The biomarkers detailed in this patent can exclude the presence of BaSIRS and could therefore be useful in monitoring immunocompromised patients to; 1) enable early and appropriate treatment if required 2) reduce the use of inappropriate therapies, procedures and management in immunocompromised patients without BaSIRS.

### Antibiotic Stewardship

[0209] In patients suspected of having a systemic infection (viral, bacterial, fungal, parasitic) a clinical diagnosis and treatment regimen is provided by the physician(s) at the time the patient presents and often in the absence of any results from diagnostic tests. This is done in the interests of rapid treatment and positive patient outcomes. However, such an approach leads to over-prescribing of antibiotics irrespective of whether the patient has a microbial infection or not. Clinician diagnosis of BaSIRS is reasonably reliable (0.88) in children but only with respect to differentiating between patients ultimately shown to be blood culture positive and those that were judged to be unlikely to have an infection at the time antibiotics were administered (Fischer, J. E., Harbarth, S., Agthe, A. G., Benn, A., Ringer, S. A., Goldmann, D. A., & Fanconi, S. (2004). Quantifying uncertainty: physicians' estimates of infection in critically ill neonates and children. Clinical Infectious Diseases: an Official Publication of the Infectious Diseases Society of America, 38(10), 1383-1390). In Fischer et al., (2004), 54% of critically ill children were put on antibiotics during their hospital stay, of which only 14% and 16% had proven systemic bacterial infection or localized infection respectively. In this study, 53% of antibiotic treatment courses for critically ill children were for those that had an unlikely infection and 38% were antibiotic treatment courses for critically ill children as a rule-out treatment episode. Clearly, pediatric physicians err on the side of caution with respect to treating critically ill patients by placing all patients suspected of an infection on antibiotics—38% of all antibiotics used in critically ill children are used on the basis of ruling out BaSIRS, that is, are used as a precaution. Antibiotics are also widely prescribed and overused in adult patients as reported in Braykov et al., 2014 (Braykov, N. P., Morgan, D. J., Schweizer, M. L., Uslan, D. Z., Kelesidis, T., Weisenberg, S. A., et al. (2014). Assessment of empirical antibiotic therapy optimisation in six hospitals: an observational cohort study. The Lancet Infectious Diseases, 14(12), 1220-1227). In this study, across six US hospitals over four days in 2009 and 2010, 60% of all patients admitted received antibiotics. Of those patients prescribed antibiotics 30% were afebrile and had a normal white blood cell count and where therefore prescribed antibiotics as a precaution. As such, an assay that can accurately diagnose an absence of BaSIRS in patients presenting with non-pathognomonic clinical signs of infection would be clinically useful and may lead to more appropriate use of antibiotics and anti-herpes viral therapies.

### Example 9

### First Example Workflow for Determining Host Response

[0210] A first example workflow for measuring host response to ensure that a SIRS is not BaSIRS will now be described. The workflow involves a number of steps depending upon availability of automated platforms. The assay uses quantitative, real-time determination of the amount of each host immune cell RNA transcript in the sample based on the detection of fluorescence on a qRT-PCR instrument (e.g. Applied Biosystems 7500 Fast Dx Real-Time PCR Instrument, Applied Biosystems, Foster City, Calif., catalogue number 440685; K082562). Transcripts are each reverse-transcribed, amplified, detected, and quantified in a separate reaction well using a probe that is visualized in the FAM channel (by example). Such reactions can be run as single-plexes (one probe for one transcript per tube), multiplexed (multiple probes for multiple transcripts in one tube), one-step (reverse transcription and PCR are performed in the same tube), or two-step (reverse transcription and PCR performed as two separate reactions in two tubes). A score is calculated using interpretive software provided separately to the kit but designed to integrate with RT-PCR machines.

[0211] The workflow below describes the use of manual processing and a pre-prepared kit.

[0212] Pre-Analytical

[0213] Blood collection

[0214] Total RNA isolation

[0215] Analytical

[0216] Reverse transcription (generation of cDNA)

[0217] qPCR preparation

[0218] qPCR

[0219] Software, Interpretation of Results and Quality Control

[0220] Output.

[0221] Kit Contents

[0222] Diluent

[0223] RT Buffer

[0224] RT Enzyme Mix

[0225] qPCR Buffer

[0226] Primer/Probe Mix

[0227] AmpliTaq Gold® (or similar)

[0228] High Positive Control

[0229] Low Positive Control

[0230] Negative Control

[0231] Blood Collection

[0232] The specimen used is a 2.5 mL sample of blood collected by venipuncture using the PAXgene® collection tubes within the PAXgene® Blood RNA System (Qiagen, kit catalogue #762164; Becton Dickinson, Collection Tubes catalogue number 762165; K042613). An alternate collection tube is Tempus® (Life Technologies).

[0233] Total RNA Isolation

[0234] Blood (2.5 mL) collected into a PAXgene RNA tube is processed according to the manufacturer's instructions. Briefly, 2.5 mL sample of blood collected by venipuncture using the PAXgene™ collection tubes within the PAXgene-m Blood RNA System (Qiagen, kit catalogue #762164; Becton Dickinson, Collection Tubes catalogue number 762165; K042613). Total RNA isolation is performed using the procedures specified in the PAXgene™ Blood RNA kit (a component of the PAXgene™ Blood RNA System). The extracted RNA is then tested for purity and yield (for example by running an A_{260/280} ratio using a Nanodrop® (Thermo Scientific)) for which a minimum quality must be (ratio >1.6). RNA should be adjusted in concentration to allow for a constant input volume to the reverse transcription reaction (below). RNA should be processed immediately or stored in single-use volumes at or below −70° C. for later processing.

[0235] Reverse Transcription

[0236] Determine the appropriate number of reaction equivalents to be prepared (master mix formulation) based on a plate map and the information provided directly below. Each clinical specimen is run in singleton.

[0237] Each batch run desirably includes the following specimens:
[0238] High Control, Low Control, Negative Control, and No Template Control (Test Diluent instead of sample) in singleton each

[0239] Program the ABI 7500 Fast Dx Instrument as detailed below.
[0240] Launch the software.
[0241] Click Create New Document
[0242] In the New Document Wizard, select the following options:
[0243] i. Assay: Standard Curve (Absolute Quantitation)
[0244] ii. Container: 96-Well Clear
[0245] iii. Template: Blank Document (or select a laboratory-defined template)
[0246] iv. Run Mode: Standard 7500
[0247] v. Operator: Enter operator's initials
[0248] vi. Plate name: [default]
   [0249] Click Finish
   [0250] Select the Instrument tab in the upper left
   [0251] In the Thermal Cycler Protocol area, Thermal Profile tab, enter the following times:
[0252] i. 25° C. for 10 minutes
[0253] ii. 45° C. for 45 minutes
[0254] iii. 93° C. for 10 minutes
[0255] iv. Hold at 25° C. for 60 minutes

[0256] In a template-free area, remove the test Diluent and RT-qPCR Test RT Buffer to room temperature to thaw. Leave the RT-qPCR Test RT Enzyme mix in the freezer and/or on a cold block.

[0257] In a template-free area, assemble the master mix in the order listed below.

[0258] RT Master Mix—Calculation:

| | Per well × N | |
|---|---|---|
| RT-qPCR Test RT Buffer | 3.5 μL | 3.5 × N |
| RT-qPCR Test RT Enzyme mix | 1.5 μL | 1.5 × N |
| Total Volume | 5 μL | 5 × N |

[0259] Gently vortex the master mix then pulse spin. Add the appropriate volume (5 μL) of the RT Master Mix into each well at room temperature.

[0260] Remove clinical specimens and control RNAs to thaw. (If the specimens routinely take longer to thaw, this step may be moved upstream in the validated method.)

[0261] Vortex the clinical specimens and control RNAs, then pulse spin. Add 10 μL of control RNA or RT-qPCR Test Diluent to each respective control or negative well.

[0262] Add 10 μL of sample RNA to each respective sample well (150 ng total input for RT; OD₂₆₀/OD₂₈₀ ratio greater than 1.6). Add 10 μL of RT-qPCR Test Diluent to the respective NTC well.

[0263] Note: The final reaction volume per well is 15 μL.

| | Samples |
|---|---|
| RT Master Mix | 5 μL |
| RNA sample | 10 μL |
| Total Volume (per well) | 15 μL |

[0264] Mix by gentle pipetting. Avoid forming bubbles in the wells.

[0265] Cover wells with a seal.

[0266] Spin the plate to remove any bubbles (1 minute at 400×g).

[0267] Rapidly transfer to ABI 7500 Fast Dx Instrument pre-programmed as detailed above.

[0268] Click Start. Click Save and Continue. Before leaving the instrument, it is recommended to verify that the run started successfully by displaying a time under Estimated Time Remaining.

[0269] qPCR master mix may be prepared to coincide roughly with the end of the RT reaction. For example, start about 15 minutes before this time. See below.

[0270] When RT is complete (i.e. resting at 25° C.; stop the hold at any time before 60 minutes is complete), spin the plate to collect condensation (1 minute at 400×g).

[0271] qPCR Preparation

[0272] Determine the appropriate number of reaction equivalents to be prepared (master mix formulation) based on a plate map and the information provided in RT Preparation above.

[0273] Program the ABI 7500 Fast Dx with the settings below.
[0274] a) Launch the software.
[0275] b) Click Create New Document
[0276] c) In the New Document Wizard, select the following options:
[0277] i. Assay: Standard Curve (Absolute Quantitation)
[0278] ii. Container: 96-Well Clear
[0279] iii. Template: Blank Document (or select a laboratory-defined template)
[0280] iv. Run Mode: Standard 7500
[0281] v. Operator: Enter operator's initials
[0282] vi. Plate name: Enter desired file name
   [0283] d) Click Next
   [0284] e) In the Select Detectors dialog box:
[0285] i. Select the detector for the first biomarker, and then click Add>>.
[0286] ii. Select the detector second biomarker, and then click Add>>, etc.
[0287] iii. Passive Reference: ROX
   [0288] f) Click Next
   [0289] g) Assign detectors to appropriate wells according to plate map.
[0290] i. Highlight wells in which the first biomarker assay will be assigned
[0291] ii. Click use for the first biomarker detector
[0292] iii. Repeat the previous two steps for the other biomarkers
[0293] iv. Click Finish
   [0294] h) Ensure that the Setup and Plate tabs are selected
   [0295] i) Select the Instrument tab in the upper left
   [0296] j) In the Thermal Cycler Protocol area, Thermal Profile tab, perform the following actions, with the results shown in FIG. 9:
[0297] i. Delete Stage 1 (unless this was completed in a laboratory-defined template).
[0298] ii. Enter sample volume of 25 μL.
[0299] iii. 95° C. 10 minutes
[0300] iv. 40 cycles of 95° C. for 15 seconds, 63° C. for 1 minute
[0301] v. Run Mode: Standard 7500
[0302] vi. Collect data using the “stage 2, step 2 (63.0@1:00)” setting
   [0303] k) Label the wells as below using this process: Right click over the plate map, then select Well Inspector. With the Well Inspector open, select a well or wells. Click back into the Well Inspector and enter the Sample Name. Close the Well Inspector when completed.
[0304] i. CONH for High Control
[0305] ii. CONL for Low Control
[0306] iii. CONN for Negative Control
[0307] iv. NTC for No Template Control
[0308] v. [Accession ID] for clinical specimens
   [0309] l) Ensure that detectors and quenchers are selected as listed below.
[0310] i. FAM for DIAPH2 biomarker 1; quencher=none
[0311] ii. FAM for SERTAD2 biomarker 2; quencher=none
[0312] iii. FAM for PARL; biomarker 3; quencher=none
[0313] iv. FAM for PAFAH2; biomarker 4; quencher=none
[0314] v. FAM for SORT1; biomarker 5; quencher=none
[0315] vi. FAM for OSBPL9; biomarker 6; quencher=none
[0316] vii. Select “ROX” for passive reference

[0317] qPCR

[0318] In a template-free area, remove the assay qPCR Buffer and assay Primer/Probe Mixes for each target to room temperature to thaw. Leave the assay AmpliTaq Gold in the freezer and/or on a cold block.

[0319] Still in a template-free area, prepare qPCR Master Mixes for each target in the listed order at room temperature.

[0320] qPCR Master Mixes—Calculation Per Sample

| | Per well | × N |
|---|---|---|
| qPCR Buffer | 11 μL | 11 × N |
| Primer/Probe Mix | 3.4 μL | 3.4 × N |
| AmpliTaq Gold ^{®} | 0.6 μL | 0.6 × N |
| Total Volume | 15 μL | 15 × N |

[0321] Example forward (F) and reverse (R) primers and probes (P) and their final reaction concentration for measuring six host response transcripts to BaSIRS biomarkers are contained in the following table (F, forward; R, reverse; P, probe).

| | | Reaction |
|---|---|---|
| Reagent | 5′-3′ Sequence | mM |
| DIAPH2-F | GTCCATGAAGAGAATCAATTGGTC | 360 |
| DIAPH2-R | AACTTGTCTTCTTTGACTCTTAACC | 360 |
| DIAPH2-P | CCCACAGAATTATCTGAGAACTG | 50 |
| SERTAD2-F | GTTCCCAGGTGGAGCTGCATG | 360 |
| SERTAD2-R | CCTTCCAGCCCATCTTCATGCTC | 360 |
| SERTAD2-P | ATGTTGGGTAAAGGAGGAAAACGG | 50 |
| PARL-F | CATCTTGGGGGAGCTCTTTTTGG | 360 |
| PARL-R | CACCACTACTGTCCAATCCCAGT | 360 |
| PARL-P | GGAAGAACAGGGAGCCGCTAG | 50 |
| PAFAH2-F | CGGGCCATGTTGGCCTTC | 360 |
| PAFAH2-R | CTGGGGTGAGCGACGGT | 360 |
| PAFAH2-P | CAGAAGCACCTCGACCTGAAAG | 50 |
| SORT1 | GATGCTTTGGACACAGCCTCCC | 360 |
| SORT1 | TGCTGGGTCCAGCTCCTCTG | 360 |
| SORT1 | GATGACTCAGATGAGGACCTCTTGG | 50 |
| OSBPL9 | GATCAGAACGAGTATGAATCCCGC | 360 |
| OSBPL9 | CCCACTGAATTTCCTTCTCCTTCC | 360 |
| OSBPL9 | ACTGAAGCAAAGCACAGGCTTG | 50 |

[0322] Gently mix the master mixes by flicking or by vortexing, and then pulse spin. Add 15 μL of qPCR Master Mix to each well at room temperature.

[0323] In a template area, add 130 μL of SeptiCyte Triage Test Diluent to each cDNA product from the RT Reaction. Reseal the plate tightly and vortex the plate to mix thoroughly.

[0324] Add 10 μL of diluted cDNA product to each well according to the plate layout.

[0325] Mix by gentle pipetting. Avoid forming bubbles in the wells.

[0326] Cover wells with an optical seal.

[0327] Spin the plate to remove any bubbles (1 minute at 400×g).

[0328] Place on real-time thermal cycler pre-programmed with the settings above.

[0329] Click Start. Click Save and Continue. Before leaving the instrument, it is recommended to verify that the run started successfully by displaying a time under Estimated Time Remaining.

[0330] Note: Do not open the qPCR plate at any point after amplification has begun. When amplification has completed, discard the unopened plate.

[0331] Software, Interpretation of Results and Quality Control

[0332] Software is specifically designed to integrate with the output of PCR machines and to apply an algorithm based on the use of multiple biomarkers. The software takes into account appropriate controls and reports results in a desired format.

[0333] When the run has completed on the ABI 7500 Fast Dx Instrument, complete the steps below in the application 7500 Fast System with 21 CFR Part 11 Software, ABI software SDS v1.4.

[0334] Click on the Results tab in the upper left corner.

[0335] Click on the Amplification Plot tab in the upper left corner.

[0336] In the Analysis Settings area, select an auto baseline and manual threshold for all targets. Enter 0.01 as the threshold.

[0337] Click on the Analyse button on the right in the Analysis Settings area.

[0338] From the menu bar in the upper left, select File then Close.

[0339] Complete the form in the dialog box that requests a reason for the change. Click OK.

[0340] Transfer the data file (.sds) to a separate computer running the specific assay RT-qPCR Test Software.

[0341] Launch the assay RT-qPCR Test Software. Log in.

[0342] From the menu bar in the upper left, select File then Open.

[0343] Browse to the location of the transferred data file (.sds). Click OK.

[0344] The data file will then be analysed using the assay's software application for interpretation of results.

[0345] Interpretation of Results and Quality Control

[0346] Results

[0347] Launch the interpretation software. Software application instructions are provided separately.

[0348] Following upload of the .sds file, the Software will automatically generate classifier scores for controls and clinical specimens.

[0349] Controls

[0350] The Software compares each CON (control) specimen (CONH, CONL, CONN) to its expected result. The controls are run in singleton.

| Control specimen | | |
|---|---|---|
| Designation | Name | Expected result |
| CONH | High Control | Score range |
| CONL | Low Control | Score range |
| CONN | Negative Control | Score range |
| NTC | No Template | Fail (no Ct for |
| | Control | all targets) |

[0351] If CONH, CONL, and/or CONN fail the batch run is invalid and no data will be reported for the clinical specimens. This determination is made automatically by the interpretive software. The batch run should be repeated starting with either a new RNA preparation or starting at the RT reaction step.

[0352] If NTC yields a result other than Fail (no Ct for all targets), the batch run is invalid and no data may be reported for the clinical specimens. This determination is made by visual inspection of the run data. The batch run should be repeated starting with either a new RNA preparation or starting at the RT reaction step.

[0353] If a second batch run fails, please contact technical services. If both the calibrations and all controls are valid, then the batch run is valid and specimen results will be reported.

[0354] Specimens

[0355] Note that a valid batch run may contain both valid and invalid specimen results.

[0356] Analytical criteria (e.g. Ct values) that qualify each specimen as passing or failing (using pre-determined data) are called automatically by the software.

[0357] Scores out of range—reported.

[0358] Quality Control

[0359] Singletons each of the Negative Control, Low Positive Control, and High Positive Control must be included in each batch run. The batch is valid if no flags appear for any of these controls.

[0360] A singleton of the No Template Control is included in each batch run and Fail (no Ct for all targets) is a valid result indicating no amplifiable material was detectable in the well.

[0361] The negative control must yield a Negative result. If the negative control is flagged as Invalid, then the entire batch run is invalid.

[0362] The low positive and high positive controls must fall within the assigned ranges. If one or both of the positive controls are flagged as Invalid, then the entire batch run is invalid.

### Example 10

### Example Output

[0363] A possible example output from the software for a RO BaSIRS assay is presented FIG. 6. The format of such a report depends on many factors including; quality control, regulatory authorities, cut-off values, the algorithm used, laboratory and clinician requirements, likelihood of misinterpretation.

[0364] In this instance the assay is called “SeptiCyte Triage”. The result is reported as a number (5.9), a position on a 0-10 scale, and a probability of the patient having an absence of BaSIRS, or not, based on historical results and the use of a pre-determined cut-off (using results from clinical studies). Results of controls within the assay may also be reported. Other information that could be reported might include: previous results and date and time of such results, a prognosis, a scale that provides cut-off values for historical testing results that separate the conditions of healthy, non-bacterial SIRS and BaSIRS such that those patients with higher scores are considered to have more severe BaSIRS. The reporting of results in this fashion would allow clinicians to see the probability of a patient having BaSIRS to enable ruling out BaSIRS with confidence.

### Example 11

### Second Example Workflow

[0365] A second example workflow will now be described. Machines have been, and are being, developed that are capable of processing a patient sample at point-of-care, or near point-of-care. Such machines require few molecular biology skills to run and are aimed at non-technical users. The idea is that the sample would be pipetted directly into a disposable cartridge(s) that is/are then inserted into the machine. For determining a specific host response the cartridge will need to extract high quality RNA from the cells in the sample for use with an appropriately designed composition to allow reverse transcription followed by RT-PCR. The machines are designed for minimum user interaction such that the user presses “Start” and within 1-3 hours results are generated. The cartridges contains all of the required reagents to perform host cell nucleic acid extraction (RNA), reverse transcription, and qRT-PCR, and the machine has appropriate software incorporated to allow use of algorithms to interpret each result and combine results, and final interpretation and printing of results.

[0366] Fresh, whole, anti-coagulated blood can be pipetted into a specialized cartridge (e.g. cartridges designed for Enigma ML machine by Enigma Diagnostics Limited (Enigma Diagnostics Limited, Building 224, Tetricus Science Park, Dstl, Porton Down, Salisbury, Wiltshire SP4 OJQ) or similar (Unyvero, Curetis AG, Max-Eyth-Str. 42 71088 Holzgerlingen, Germany)), and on-screen instructions followed to test for differentiating a BaSIRS from other forms of SIRS. Inside the machine RNA is first extracted from the whole blood and is then converted into cDNA. The cDNA is then used in qRT-PCR reactions. The reactions are followed in real time and Ct values calculated. On-board software generates a result output (see, FIG. 6). Appropriate quality control measures for RNA quality, no template controls, high and low template controls and expected Ct ranges ensure that results are not reported erroneously.

### Example 12

### Example Algorithm Combining Derived Biomarkers for Assessing a Suspected BaSIRS

[0367] Derived biomarkers can be used in combination to increase the diagnostic power for separating various conditions. Determining which markers to use, and how many, for separating various conditions can be achieved by calculating Area Under Curve (AUC).

[0368] Biomarker ratios (derived markers) can be used in combination to increase the diagnostic power for separating BaSIRS and SIRS due to other causes. Determining which markers to use, and how many, for separating various conditions can be achieved by calculating Area Under Curve (AUC).

[0369] FIG. 4 shows the effect on AUC (in this instance for separating BaSIRS and SIRS due to other causes) of adding derived biomarkers to the diagnostic signature for separating subjects with and without BaSIRS in Gene Expression Omnibus (GEO) datasets. Diagnostic power (as measured by AUC, Y axis) of a single derived biomarker starts at around 0.86 and increases as derived markers are added to a maximum of around 0.96. However, beyond the use of three derived markers (AUC 0.94) there is likely overfitting, or introduction of noise. For commercial development of derived markers other factors come into play such as cost-effectiveness, assay complexity and capabilities of the qRT-PCR platform. In this example, the addition of derived biomarkers beyond three or four does not significantly improve performance, adds little additional information and likely runs the risk of data over-fitting and addition of noise. Thus, for commercial purposes, a combination of the three best derived markers provides a balance between maximal AUC and over-fitting.

[0370] As such, and by example, a six-biomarker signature (three derived biomarkers) offers the appropriate balance between simplicity, practicality and commercial risk for separating BaSIRS and SIRS due to other causes. Further, an equation using six biomarkers weighs each marker equally which also provides additional robustness in cases of analytical or clinical variability.

[0371] One example equation that provides good diagnostic power for separating BaSIRS and SIRS due to other causes is (where the value for each biomarker is a Ct value):

“Diagnostic Score”=(DIAPH2−SERTAD2)+(PARL−PAFAH2)+(SORT1−OSBPL9)

[0372] Box and whisker plots using these six biomarkers for six GEO datasets are shown in FIG. 6 showing good separation between controls (lower box and whiskers−those subjects without BaSIRS) and cases (higher box and whiskers−those subjects with confirmed BaSIRS).

[0373] Note: each marker in the Diagnostic Score above is the Log 2 transformed concentration of the marker in the sample.

[0374] The disclosure of every patent, patent application, and publication cited herein is hereby incorporated herein by reference in its entirety.

[0375] The citation of any reference herein should not be construed as an admission that such reference is available as “Prior Art” to the instant application.

[0376] Throughout the specification the aim has been to describe the preferred embodiments of the invention without limiting the invention to any one embodiment or specific collection of features. Those of skill in the art will therefore appreciate that, in light of the instant disclosure, various modifications and changes can be made in the particular embodiments exemplified without departing from the scope of the present invention. All such modifications and changes are intended to be included within the scope of the appended claims.

### Tables

TABLE 1
List and condition description of public datasets (GEO) used to find
the best performing BaSIRS derived biomarkers for use in a triage
setting, including the number of subjects in each cohort (in brackets).

| Dataset | Condition |
|---|---|
| GSE30119 | Staphylococcus aureus (99) vs Healthy (44) |
| GSE33341 | S. aureus, E coli (51) vs Healthy (43) |
| GSE16129 | S. aureus (42) vs Healthy (10) |
| GSE25504 | Bacterial (26) vs Healthy (37) |
| G5E40586 | Bacterial meningitis (21) vs Healthy (18) |
| G5E40012 | Bacterial pneumonia (19) vs Viral and SIRS (115) |

TABLE 2
List and condition description of public datasets (GEO) used to find the best
performing non-bacterial SIRS derived biomarkers. These were then subtracted from the BaSIRS
derived biomarkers identified from the datasets in Table 1. Note that other datasets were used to
derive a set of specific viral derived biomarkers which were also subtracted from the BaSIRS
derived biomarkers identified from the datasets in Table 1.

| Dataset | Description | Cases vs Controls | Overlapping Ratios with BaSIRS |
|---|---|---|---|
| GSE17755 | Arthritis; Lupus | 191 vs 53 | 2346 (8%) |
| G5E19301 | Asthma | 166 vs 394 | 1 (<1%) |
| GSE35846 | Race, gender, BMI | 190 vs 0 | 1180 (4%) |
| GSE36809 | Trauma | 167 vs 37 | 16944 (55%) |
| GSE38485 | Schizophrenia | 106 vs 96 | 13 (<1%) |
| G5E47655 | Anaphylaxis | 6 vs 5 | 733 (2%) |
| G5E52428 | Influenza | 41 vs 39 | 6401 (21%) |

TABLE 3
The mean cumulative performance (AUC) in the BaSIRS datasets
of the derived biomarkers (that comprise the three derived
biomarker signature) when each are added sequentially.

| Derived Biomarker | Cumulative AUC |
|---|---|
| DIAPH2 : SERTAD2 | 0.863 |
| PARL : PAFAH2 | 0.92 |
| SORT1 : OSBPL9 | 0.94 |

TABLE 4
Results of greedy searches to find the best performing derived biomarkers (when added sequentially up to 10) using the combined
bacterial datasets. Three different cut-off values were used (AUC 70, 80 and 90) for derived biomarkers in the non-bacterial datasets.
Using a low cut-off value in the non-bacterial datasets resulted in more derived biomarkers that were taken from the pool of derived
biomarkers identified using bacterial datasets. Hence, the total numbers of derived biomarkers remaining after subtraction were
92, 493 and 3257 for cut-off values of 70, 80 and 90 respectively. The best combination of derived biomarkers with the maximum AUC,
maximum specificity, minimum noise and highest commercial utility was considered to be DIAPH2 / SERTAD2; PARL / PAFAH2;
SORT1 / OSBPL9 obtained after the third greedy search iteration.

| Greedy Search | Cut- | Mean | |
|---|---|---|---|
| Iteration | off | AUC | Combination |
| 1 | 70 | 0.863 | DIAPH2_SERTAD2 |
| 2 | 70 | 0.920 | PARL_PAFAH2 + DIAPH2_SERTAD2 |
| 3 | 70 | 0.940 | PARL_PAFAH2 + SORT1_OSBPL9 + DIAPH2_SERTAD2 |
| 4 | 70 | 0.952 | PARL_PAFAH2 + SORT1_OSBPL9 + CHPT1_RANBP10 + DIAPH2_SERTAD2 |
| 5 | 70 | 0.956 | PARL_PAFAH2 + SORT1_OSBPL9 + FLVCR2_KATNA1 + CHPT1 _RANBP10 + DIAPH2_SERTAD2 |
| 6 | 70 | 0.959 | PARL_PAFAH2 + SORT1_OSBPL9 + GAS7_RAB11FIP1 + FLVCR2_KATNA1 + |
| | | | CHPT1_RANBP10 + DIAPH2_SERTAD2 |
| 7 | 70 | 0.962 | PARL_PAFAH2 + SORT1_OSBPL9 + GAS7_RAB11FIP1 + FLVCR2_KATNA1 + |
| | | | CHPT1_RANBP10 + DIAPH2_SERTAD2 + PRRG4_GLOD4 |
| 8 | 70 | 0.963 | PARL_PAFAH2 + SORT1_OSBPL9 + GAS7_RAB11FIP1 + FLVCR2_KATNA1 + |
| | | | CHPT1_RANBP10 + DIAPH2_SERTAD2 + PRRG4_GLOD4 + FURIN_RANBP10 |
| 9 | 70 | 0.964 | CHPT1_FBXO7 + PARL_PAFAH2 + SORT1_OSBPL9 + GAS7_RAB11FIP1 + |
| | | | FLVCR2_KATNA1 + CHPT1_RANBP10 + DIAPH2_SERTAD2 + PRRG4 GLOD4 + FURIN RANBP10 |
| 10 | 70 | 0.965 | CHPT1_FBXO7 + PARL_PAFAH2 + SORT1_OSBPL9 + GAS7_RAB11FIP1 + SORT1_CNBP + |
| | | | FLVCR2_KATNA1 + CHPT1_RANBP10 + DIAPH2_SERTAD2 + PRRG4_GLOD4 + FURIN_RANBP10 |
| 1 | 80 | 0.873 | SLC25A28_ID3 |
| 2 | 80 | 0.917 | SLC25A28_ID3 + SORT1_INPP1 |
| 3 | 80 | 0.937 | DIAPH2_SERTAD2 + SLC25A28_ID3 + SORT1_INPP1 |
| 4 | 80 | 0.947 | RHEB_IMP3 + DIAPH2_SERTAD2 + SLC25A28_ID3 + SORT1_INPP1 |
| 5 | 80 | 0.952 | DIAPH2_CRLF3 + RHEB_IMP3 + DIAPH2_SERTAD2 + SLC25A28_ID3 + SORT1_INPP1 |
| 6 | 80 | 0.956 | DIAPH2_CRLF3 + RHEB_IMP3 + DIAPH2_SERTAD2 + HOXB6_PAFAH2 + SLC25A28_ID3 + |
| | | | SORT1_INPP1 |
| 7 | 80 | 0.959 | CHPT1_FBXO7 + DIAPH2_CRLF3 + RHEB_IMP3 + DIAPH2_SERTAD2 + HOXB6_PAFAH2 + |
| | | | SLC25A28_ID3 + SORT1_INPP1 |
| 8 | 80 | 0.961 | CHPT1_FBXO7 + DIAPH2_CRLF3 + SORT1_OSBPL9 + RHEB_IMP3 + DIAPH2_SERTAD2 + |
| | | | HOXB6_PAFAH2 + SLC25A28_ID3 + SORT1_INPP1 |
| 9 | 80 | 0.963 | CHPT1_FBXO7 + DIAPH2_CRLF3 + SMPDL3A_BTG2 + SORT1_OSBPL9 + RHEB_IMP3 + |
| | | | DIAPH2_SERTAD2 + HOXB6_PAFAH2 + SLC25A28_ID3 + SORT1_INPP1 |
| 10 | 80 | 0.965 | CHPT1_FBXO7 + DIAPH2_CRLF3 + SMPDL3A_BTG2 + SORT1_OSBPL9 + RHEB_IMP3 + |
| | | | DIAPH2_SERTAD2 + HOXB6_PAFAH2 + FURIN_RANBP1O + SLC25A28_ID3 + SORT1 _INPP1 |
| 1 | 90 | 0.893 | DIAPH2_PAFAH2 |
| 2 | 90 | 0.927 | SORT1_OSBPL9 + DIAPH2_PAFAH2 |
| 3 | 90 | 0.944 | SORT1_OSBPL9 + CHPT1_RANBP10 + DIAPH2_PAFAH2 |
| 4 | 90 | 0.950 | SORT1_OSBPL9 + CHPT1_RANBP10 + SMPDL3A_SYPL1 + DIAPH2_PAFAH2 |
| 5 | 90 | 0.954 | SORT1_OSBPL9 + GAS7_RAB11FIP1 + CHPT1_RANBP10 + SMPDL3A_SYPL1 + DIAPH2_PAFAH2 |
| 6 | 90 | 0.956 | SORT1_OSBPL9 + GAS7_RAB11FIP1 + HIST1H2BK_WDR33 + CHPT1_RANBP10 + |
| | | | SMPDL3A_SYPL1 + DIAPH2_PAFAH2 |
| 7 | 90 | 0.959 | SORT1_OSBPL9 + GAS7_RAB11FIP1 + HIST1H2BK_WDR33 + CHPT1_RANBP10 + |
| | | | SMPDL3A_SYPL1 + DIAPH2_CCR3 + DIAPH2_PAFAH2 |
| 8 | 90 | 0.960 | SORT1_OSBPL9 + GAS7_RAB11FIP1 + HIST1H2BK_WDR33 + CHPT1_RANBP10 + |
| | | | MUT_ACTL6A + SMPDL3A_SYPL1 + DIAPH2_CCR3 + DIAPH2_PAFAH2 |
| 9 | 90 | 0.962 | SORT1_OSBPL9 + GAS7_RAB11FIP1 + FLVCR2_KATNA1 + HIST1H2BK_WDR33 + |
| | | | CHPT1_RANBP10 + MUT_ACTL6A + SMPDL3A_SYPL1 + DIAPH2_CCR3 + DIAPH2_PAFAH2 |
| 10 | 90 | 0.964 | SORT1_OSBPL9 + GAS7_RAB11FIP1 + FLVCR2_KATNA1 + HIST1H2BK_WDR33 + |
| | | | CHPT1_RANBP10 + MUT_ACTL6A + SMPDL3A_SYPL1 + SORT1 AKAP7 + |
| | | | DIAPH2_CCR3 + DIAPH2_PAFAH2 |

TABLE 5
(a and b): Groups of derived biomarkers (A-F) based on their correlation to each individual
biomarker in the three derived biomarker signature of DIAPH2/SERTAD2; PARL/PAFAH2;
SORT1/OSBPL9. Groups A-C are contained in Table 5a and Groups D-F are contained in
Table 5b. A DNA SEQ ID# is provided for each biomarker HUGO gene symbol.
Table 5a

| Group A | | | Group B | | | Group C | | |
|---|---|---|---|---|---|---|---|---|
| | DNA | Correlation to | | DNA | Correlation to | | DNA | Correlation to |
| Symbol | SEQ ID | DIAPH2 | Symbol | SEQ ID | SERTAD2 | Symbol | SEQ ID | PARL |
| CYBB | 36 | 0.626 | PHF3 | 115 | 0.380 | AIF1 | 4 | 0.516 |
| FXR1 | 53 | 0.351 | BRD7 | 15 | 0.327 | PTPN2 | 128 | 0.478 |
| GBP2 | 56 | 0.280 | TOB1 | 172 | 0.326 | COX5B | 30 | 0.439 |
| HIST1H2BM | 63 | 0.141 | MAP4K2 | 90 | 0.285 | PSMB4 | 126 | 0.429 |
| HIST1H4L | 65 | 0.061 | WDR33 | 177 | 0.269 | EIF4E2 | 43 | 0.426 |
| MAPK8IP3 | 92 | 0.289 | BTG2 | 16 | 0.243 | RDX | 137 | 0.403 |
| MNT | 99 | 0.395 | AMD1 | 9 | 0.237 | DERA | 38 | 0.376 |
| MUT | 101 | 0.421 | RNASE6 | 138 | 0.224 | CTSH | 35 | 0.366 |
| NAGK | 105 | 0.125 | RAB11FIP1 | 130 | 0.183 | HSPA4 | 70 | 0.292 |
| NMI | 106 | 0.419 | ADD1 | 2 | 0.158 | VAV1 | 176 | 0.240 |
| PPP1CB | 121 | 0.239 | HMG20B | 67 | 0.139 | PPP1CA | 120 | 0.223 |
| PRPF40A | 124 | 0.469 | | | | CPVL | 31 | 0.223 |
| PRRG4 | 125 | 0.291 | | | | PDCD5 | 112 | 0.191 |
| PUS3 | 129 | 0.417 | | | | | | |
| SLAMF7 | 152 | 0.290 | | | | | | |
| SLC11A2 | 153 | 0.388 | | | | | | |
| SLC39A8 | 157 | 0.510 | | | | | | |
| SNAPC1 | 159 | 0.317 | | | | | | |
| TMEM80 | 171 | 0.215 | | | | | | |

| Table 5b | | |
|---|---|---|
| Group D | Group E | Group F |

| | DNA | Correlation to | | DNA | Correlation to | | DNA | Correlation to |
|---|---|---|---|---|---|---|---|---|
| Symbol | SEQ ID | PAFAH2 | Symbol | SEQ ID | SORT1 | Symbol | SEQ ID | OSBPL9 |
| IMP3 | 75 | 0.651 | GAS7 | 55 | 0.765 | CD44 | 20 | 0.487 |
| GLOD4 | 58 | 0.634 | FLVCR2 | 49 | 0.762 | AKTIP | 7 | 0.477 |
| IL7R | 74 | 0.632 | TLR5 | 169 | 0.761 | ATP13A3 | 12 | 0.473 |
| ID3 | 71 | 0.604 | FCER1G | 47 | 0.753 | ADAM19 | 1 | 0.429 |
| KLRF1 | 83 | 0.604 | SLC2A3 | 156 | 0.740 | KATNA1 | 81 | 0.408 |
| SBF1 | 146 | 0.573 | S100A12 | 143 | 0.730 | STK38 | 164 | 0.407 |
| CCND2 | 19 | 0.563 | PSTPIP2 | 127 | 0.709 | TINF2 | 168 | 0.326 |
| LFNG | 85 | 0.562 | GNS | 59 | 0.698 | RAB9A | 132 | 0.321 |
| MRPS18B | 100 | 0.551 | METTL9 | 95 | 0.695 | INPP1 | 77 | 0.261 |
| HLA-DPA1 | 66 | 0.545 | MMP8 | 98 | 0.685 | CNBP | 27 | 0.240 |
| SLC9A3R1 | 158 | 0.542 | MAPK14 | 91 | 0.678 | ITGB1 | 80 | 0.193 |
| HMGN4 | 68 | 0.537 | CD59 | 21 | 0.675 | MFSD10 | 96 | 0.173 |
| C6orf48 | 18 | 0.529 | CLEC4E | 25 | 0.673 | | | |
| ARL2BP | 10 | 0.522 | MICAL1 | 97 | 0.658 | | | |
| CDC14A | 22 | 0.517 | MCTP1 | 93 | 0.644 | | | |
| RPA2 | 140 | 0.503 | GAPDH | 54 | 0.640 | | | |
| ST3GAL5 | 162 | 0.502 | IMPDH1 | 76 | 0.638 | | | |
| EIF4A2 | 42 | 0.501 | ATP8B4 | 14 | 0.623 | | | |
| CERK | 23 | 0.496 | EMR1 | 44 | 0.618 | | | |
| RASSF7 | 136 | 0.491 | SLC12A9 | 154 | 0.610 | | | |
| PHB | 114 | 0.488 | S100P | 144 | 0.603 | | | |
| TRAF3IP2 | 174 | 0.487 | IFNGR2 | 73 | 0.594 | | | |
| KLF2 | 82 | 0.485 | PDGFC | 113 | 0.592 | | | |
| RAB11FIP3 | 131 | 0.476 | CTSA | 33 | 0.559 | | | |
| C21orf59 | 17 | 0.475 | ALDOA | 8 | 0.552 | | | |
| SSBP2 | 161 | 0.473 | ITGAX | 79 | 0.549 | | | |
| GIMAP4 | 57 | 0.437 | GSTO1 | 61 | 0.545 | | | |
| CYP20A1 | 37 | 0.428 | LHFPL2 | 86 | 0.526 | | | |
| RASGRP2 | 134 | 0.427 | LTF | 89 | 0.515 | | | |
| AKT1 | 6 | 0.413 | SDHC | 148 | 0.493 | | | |
| HCP5 | 61 | 0.388 | TIMP1 | 167 | 0.484 | | | |
| TPP2 | 173 | 0.386 | LTA4H | 88 | 0.474 | | | |
| SYNE2 | 165 | 0.383 | USP3 | 175 | 0.460 | | | |
| FUT8 | 52 | 0.369 | MEGF9 | 94 | 0.456 | | | |
| NUPL2 | 107 | 0.361 | FURIN | 51 | 0.442 | | | |
| MYOM2 | 104 | 0.360 | ATP6V0A1 | 13 | 0.425 | | | |
| RPS8 | 142 | 0.355 | PROS1 | 123 | 0.424 | | | |
| RNF34 | 139 | 0.342 | ATG9A | 11 | 0.398 | | | |
| DLST | 41 | 0.329 | PLAC8 | 116 | 0.394 | | | |
| CTDSP2 | 32 | 0.310 | LAMP1 | 84 | 0.393 | | | |
| EMP3 | 44 | 0.306 | COQ10B | 29 | 0.393 | | | |
| PLEKHG3 | 117 | 0.274 | ST3GAL6 | 163 | 0.391 | | | |
| DHX16 | 39 | 0.271 | CTSC | 34 | 0.391 | | | |
| RASGRP3 | 135 | 0.232 | ENO1 | 45 | 0.389 | | | |
| COMMD4 | 28 | 0.223 | OBFC1 | 108 | 0.382 | | | |
| ISG20 | 78 | 0.222 | TAX1BP1 | 166 | 0.375 | | | |
| POLR2C | 119 | 0.204 | MYL9 | 103 | 0.350 | | | |
| SH3GLB2 | 151 | 0.187 | HIST1H3C | 64 | 0.287 | | | |
| SASH3 | 145 | 0.182 | ZBTB17 | 179 | 0.281 | | | |
| GRAP2 | 60 | 0.157 | CHPT1 | 24 | 0.279 | | | |
| RPS6KB2 | 141 | 0.154 | SLC25A37 | 155 | 0.266 | | | |
| FGL2 | 48 | 0.154 | PLEKHM2 | 118 | 0.266 | | | |
| AKAP7 | 5 | 0.141 | LILRB3 | 87 | 0.261 | | | |
| SDF2L1 | 147 | 0.136 | YPEL5 | 178 | 0.226 | | | |
| FBXO7 | 46 | 0.116 | FTL | 50 | 0.205 | | | |
| MX1 | 102 | 0.112 | SH3BGRL | 150 | 0.163 | | | |
| IFIT1 | 72 | 0.062 | HOXB6 | 69 | 0.144 | | | |
| TMEM106C | 170 | 0.057 | PPP1R11 | 122 | 0.139 | | | |
| RANBP10 | 133 | 0.045 | CLU | 26 | 0.136 | | | |
| | | | HEBP1 | 62 | 0.125 | | | |

TABLE 6
Performance of 200 derived biomarkers at a set sepsis prevalence of 10%.
Performance measures include Area Under Curve (AUC) and Negative
Predictive Value (NPV). The NPV of these derived biomarkers
increases as the prevalence of sepsis decreases, so all those
listed would perform well in an emergency room setting where the
prevalence of sepsis is estimated to be closer to 4% (see Table 7).

| | | | AUC | AUC | NPV | NPV |
|---|---|---|---|---|---|---|
| Derived Biomarker | AUC | NPV | (upper) | (lower) | (lower) | (upper) |
| AIF1_HMGN4 | 0.809 | 94.599 | 0.697 | 0.905 | 92.208 | 97.370 |
| ALDOA_MAP4K2 | 0.813 | 95.000 | 0.663 | 0.936 | 95.000 | 100.000 |
| ATG9A_RAB11FIP3 | 0.802 | 95.254 | 0.698 | 0.889 | 92.203 | 98.649 |
| ATP13A3_IL7R | 0.839 | 95.044 | 0.707 | 0.936 | 92.303 | 97.648 |
| ATP6V0A1_RASSF7 | 0.808 | 94.884 | 0.673 | 0.913 | 91.856 | 97.532 |
| ATP8B4_CCND2 | 0.833 | 94.937 | 0.734 | 0.923 | 92.396 | 97.562 |
| CD44_GIMAP4 | 0.748 | 95.034 | 0.591 | 0.911 | 90.562 | 100.000 |
| CD44_HLA-DPA1 | 0.751 | 95.065 | 0.576 | 0.897 | 91.661 | 98.552 |
| CD44_IL7R | 0.781 | 95.030 | 0.652 | 0.906 | 92.500 | 97.503 |
| CD44_RPA2 | 0.760 | 95.100 | 0.625 | 0.917 | 92.578 | 98.552 |
| CD59_GIMAP4 | 0.803 | 94.977 | 0.638 | 0.925 | 91.765 | 97.532 |
| CDC14A_CCND2 | 0.587 | 92.613 | 0.439 | 0.719 | 66.667 | 100.000 |
| CDC14A_IL7R | 0.611 | 93.349 | 0.456 | 0.766 | 80.000 | 100.000 |
| CHPT1_FBXO7 | 0.819 | 94.665 | 0.715 | 0.929 | 91.949 | 97.720 |
| CHPT1_RANBP10 | 0.800 | 95.205 | 0.672 | 0.914 | 92.400 | 97.531 |
| CLEC4E_MX1 | 0.718 | 94.976 | 0.551 | 0.877 | 91.070 | 98.279 |
| CLEC4E_SYNE2 | 0.793 | 94.971 | 0.673 | 0.922 | 91.775 | 98.651 |
| CLU_CCND2 | 0.758 | 94.854 | 0.613 | 0.870 | 91.341 | 97.468 |
| CLU_IL7R | 0.760 | 94.633 | 0.643 | 0.868 | 91.543 | 97.260 |
| COQ10B_TRAF3IP2 | 0.799 | 94.810 | 0.650 | 0.923 | 91.566 | 97.590 |
| COX5B_PHB | 0.832 | 94.855 | 0.730 | 0.926 | 92.308 | 97.677 |
| CPVL_IL7R | 0.677 | 94.613 | 0.539 | 0.789 | 80.000 | 100.000 |
| CTSA_DLST | 0.822 | 94.991 | 0.678 | 0.933 | 92.456 | 97.620 |
| CTSA_HMG20B | 0.821 | 94.629 | 0.706 | 0.936 | 92.130 | 97.592 |
| CTSC_CCND2 | 0.799 | 95.082 | 0.642 | 0.907 | 92.016 | 97.588 |
| CTSH_IL7R | 0.787 | 95.016 | 0.661 | 0.885 | 92.000 | 97.608 |
| CYBB_BRD7 | 0.805 | 95.164 | 0.667 | 0.915 | 75.000 | 100.000 |
| DERA_HMGN4 | 0.827 | 94.719 | 0.718 | 0.935 | 91.860 | 97.648 |
| DIAPH2_CCND2 | 0.894 | 95.000 | 0.805 | 0.964 | 95.000 | 100.000 |
| DIAPH2_HLA-DPA1 | 0.862 | 94.896 | 0.749 | 0.953 | 91.574 | 97.620 |
| DIAPH2_IL7R | 0.871 | 94.999 | 0.777 | 0.948 | 92.130 | 97.647 |
| DIAPH2_PHF3 | 0.822 | 94.627 | 0.727 | 0.911 | 91.856 | 97.438 |
| DIAPH2_RAB9A | 0.806 | 94.974 | 0.669 | 0.918 | 92.041 | 97.619 |
| DIAPH2_RNASE6 | 0.792 | 95.025 | 0.668 | 0.898 | 91.667 | 97.335 |
| DIAPH2_SERTAD2 | 0.857 | 94.759 | 0.726 | 0.935 | 91.860 | 97.593 |
| DIAPH2_ST3GAL5 | 0.818 | 94.839 | 0.683 | 0.941 | 92.130 | 97.592 |
| DIAPH2_STK38 | 0.795 | 95.399 | 0.671 | 0.880 | 91.539 | 98.572 |
| EIF4E2_C21orf59 | 0.821 | 95.255 | 0.717 | 0.923 | 92.098 | 98.685 |
| EMR1_AKT1 | 0.786 | 94.876 | 0.667 | 0.891 | 91.775 | 98.571 |
| ENO1_IL7R | 0.803 | 94.555 | 0.653 | 0.903 | 91.886 | 97.468 |
| FCER1G_CD44 | 0.740 | 95.150 | 0.596 | 0.858 | 90.909 | 98.439 |
| FCER1G_CDC14A | 0.847 | 95.200 | 0.751 | 0.932 | 92.130 | 97.592 |
| FCER1G_MX1 | 0.780 | 94.926 | 0.566 | 0.931 | 91.837 | 97.678 |
| FCER1G_SDHC | 0.673 | 95.181 | 0.523 | 0.789 | 88.868 | 100.000 |
| FLVCR2_KATNA1 | 0.837 | 95.209 | 0.700 | 0.947 | 92.045 | 97.802 |
| FTL_CCND2 | 0.748 | 95.191 | 0.634 | 0.868 | 91.803 | 98.662 |
| FTL_IL7R | 0.770 | 95.203 | 0.654 | 0.872 | 92.000 | 98.509 |
| FURIN_ADD1 | 0.824 | 95.043 | 0.694 | 0.931 | 92.203 | 97.500 |
| FURIN_BTG2 | 0.830 | 94.872 | 0.733 | 0.918 | 92.771 | 97.590 |
| FURIN_RANBP10 | 0.824 | 94.819 | 0.716 | 0.912 | 92.573 | 97.373 |
| FURIN_SH3GLB2 | 0.826 | 95.000 | 0.693 | 0.938 | 95.000 | 100.000 |
| FUT8_IL7R | 0.593 | 94.288 | 0.431 | 0.764 | 80.000 | 100.000 |
| FXR1_EIF4A2 | 0.816 | 95.052 | 0.690 | 0.927 | 91.760 | 97.561 |
| GAPDH_COMMD4 | 0.794 | 95.061 | 0.622 | 0.922 | 92.295 | 97.778 |
| GAPDH_PPP1CA | 0.802 | 94.851 | 0.684 | 0.915 | 91.358 | 98.668 |
| GAPDH_RPS6KB2 | 0.789 | 95.186 | 0.640 | 0.919 | 91.775 | 98.701 |
| GAS7_ADD1 | 0.809 | 94.939 | 0.672 | 0.935 | 91.561 | 97.698 |
| GAS7_RAB11FIP1 | 0.855 | 95.397 | 0.719 | 0.950 | 92.748 | 97.648 |
| GBP2_GIMAP4 | 0.808 | 95.089 | 0.657 | 0.926 | 92.593 | 97.590 |
| GBP2_HCP5 | 0.796 | 94.955 | 0.684 | 0.913 | 91.765 | 98.630 |
| GBP2_MX1 | 0.709 | 94.867 | 0.533 | 0.858 | 87.097 | 100.000 |
| GNS_PLEKHG3 | 0.833 | 95.069 | 0.726 | 0.937 | 92.126 | 97.676 |
| GSTO1_RASGRP3 | 0.802 | 94.904 | 0.654 | 0.923 | 91.667 | 97.619 |
| GSTO1_SDF2L1 | 0.793 | 94.946 | 0.668 | 0.913 | 79.750 | 100.000 |
| HEBP1_SSBP2 | 0.824 | 95.019 | 0.690 | 0.926 | 91.238 | 97.620 |
| HIST1H2BM_CCND2 | 0.757 | 95.085 | 0.622 | 0.858 | 92.374 | 98.463 |
| HIST1H2BM_IL7R | 0.755 | 94.864 | 0.620 | 0.865 | 91.524 | 98.462 |
| HIST1H3C_IL7R | 0.804 | 95.337 | 0.701 | 0.897 | 92.758 | 98.593 |
| HOXB6_PAFAH2 | 0.832 | 94.632 | 0.728 | 0.910 | 91.517 | 97.502 |
| HSPA4_IMP3 | 0.820 | 94.753 | 0.704 | 0.904 | 92.102 | 97.404 |
| IFNGR2_CCND2 | 0.841 | 95.248 | 0.715 | 0.931 | 92.400 | 97.562 |
| IFNGR2_HLA-DPA1 | 0.812 | 94.909 | 0.663 | 0.935 | 91.954 | 98.687 |
| IFNGR2_IL7R | 0.823 | 94.941 | 0.684 | 0.918 | 91.945 | 97.561 |
| IMPDH1_BTG2 | 0.837 | 95.128 | 0.701 | 0.940 | 93.231 | 97.701 |
| ITGAX_RASGRP2 | 0.791 | 95.077 | 0.668 | 0.892 | 92.303 | 97.468 |
| ITGB1_IL7R | 0.708 | 95.114 | 0.571 | 0.846 | 83.284 | 100.000 |
| LAMP1_HLA-DPA1 | 0.760 | 94.964 | 0.598 | 0.895 | 91.667 | 98.630 |
| LAMP1_IL7R | 0.775 | 94.949 | 0.635 | 0.900 | 75.000 | 100.000 |
| LHFPL2_ISG20 | 0.804 | 94.887 | 0.678 | 0.899 | 91.635 | 97.502 |
| LILRB3_IL7R | 0.816 | 94.833 | 0.684 | 0.926 | 79.167 | 100.000 |
| LTA4H_CCND2 | 0.812 | 95.186 | 0.682 | 0.921 | 92.176 | 98.595 |
| LTA4H_CERK | 0.809 | 95.000 | 0.706 | 0.905 | 95.000 | 100.000 |
| LTA4H_CPVL | 0.761 | 94.870 | 0.628 | 0.860 | 91.983 | 97.470 |
| LTA4H_RPS8 | 0.847 | 94.744 | 0.725 | 0.948 | 92.473 | 96.703 |
| LTA4H_ST3GAL5 | 0.760 | 95.048 | 0.583 | 0.903 | 91.347 | 97.583 |
| LTA4H_TMEM106C | 0.708 | 95.071 | 0.566 | 0.836 | 90.843 | 98.173 |
| LTA4H_WDR33 | 0.784 | 95.012 | 0.664 | 0.916 | 91.549 | 98.632 |
| LTF_MAP4K2 | 0.777 | 95.138 | 0.624 | 0.909 | 91.949 | 98.684 |
| MAPK14_GIMAP4 | 0.827 | 95.325 | 0.711 | 0.909 | 92.395 | 97.500 |
| MAPK14_IL7R | 0.836 | 94.894 | 0.710 | 0.917 | 91.954 | 97.534 |
| MAPK14_MX1 | 0.715 | 94.947 | 0.568 | 0.868 | 92.423 | 98.465 |
| MAPK8IP3_IMP3 | 0.819 | 95.259 | 0.705 | 0.932 | 92.551 | 98.670 |
| MCTP1_AMD1 | 0.845 | 95.150 | 0.699 | 0.957 | 74.583 | 100.000 |
| MCTP1_TOB1 | 0.841 | 95.250 | 0.733 | 0.933 | 92.209 | 98.719 |
| MEGF9_CCND2 | 0.785 | 95.203 | 0.656 | 0.907 | 92.830 | 97.531 |
| MEGF9_CDC14A | 0.754 | 95.057 | 0.628 | 0.895 | 71.429 | 100.000 |
| MEGF9_GIMAP4 | 0.763 | 94.755 | 0.609 | 0.893 | 91.760 | 97.588 |
| MEGF9_HLA-DPA1 | 0.758 | 95.055 | 0.589 | 0.900 | 92.762 | 97.590 |
| MEGF9_IL7R | 0.786 | 95.082 | 0.640 | 0.893 | 92.857 | 97.674 |
| METTL9_AKTIP | 0.808 | 95.102 | 0.680 | 0.904 | 91.876 | 97.593 |
| MICAL1_DHX16 | 0.805 | 94.977 | 0.680 | 0.903 | 92.195 | 97.470 |
| MICAL1_STK38 | 0.801 | 95.014 | 0.692 | 0.905 | 92.405 | 97.526 |
| MMP8_CCND2 | 0.851 | 94.945 | 0.744 | 0.946 | 91.954 | 97.701 |
| MMP8_CD44 | 0.681 | 95.171 | 0.550 | 0.817 | 89.617 | 100.000 |
| MMP8_CTSC | 0.628 | 93.515 | 0.476 | 0.781 | 90.284 | 96.777 |
| MMP8_ENO1 | 0.657 | 94.033 | 0.498 | 0.810 | 89.186 | 97.738 |
| MMP8_FGL2 | 0.745 | 95.048 | 0.598 | 0.892 | 91.892 | 98.554 |
| MMP8_FTL | 0.675 | 95.472 | 0.527 | 0.840 | 88.199 | 100.000 |
| MMP8_FUT8 | 0.830 | 95.077 | 0.682 | 0.941 | 92.495 | 97.671 |
| MMP8_IL7R | 0.854 | 94.995 | 0.753 | 0.941 | 91.667 | 97.623 |
| MMP8_ITGB1 | 0.762 | 95.044 | 0.621 | 0.884 | 91.364 | 98.388 |
| MMP8_LAMP1 | 0.668 | 95.074 | 0.525 | 0.798 | 86.894 | 100.000 |
| MMP8_PLAC8 | 0.615 | 92.780 | 0.452 | 0.764 | 89.987 | 95.062 |
| MMP8_RPS8 | 0.845 | 94.742 | 0.711 | 0.947 | 92.218 | 96.591 |
| MMP8_SDHC | 0.626 | 94.167 | 0.465 | 0.773 | 66.667 | 100.000 |
| MMP8_ST3GAL5 | 0.783 | 95.070 | 0.646 | 0.895 | 92.194 | 97.468 |
| MMP8_TMEM106C | 0.792 | 95.070 | 0.678 | 0.897 | 91.755 | 97.503 |
| MMP8_TPP2 | 0.786 | 94.959 | 0.666 | 0.892 | 92.400 | 97.438 |
| MMP8_VAV1 | 0.644 | 94.122 | 0.489 | 0.787 | 87.500 | 100.000 |
| MNT_KLF2 | 0.823 | 94.677 | 0.704 | 0.904 | 91.856 | 97.375 |
| MNT_SLC9A3R1 | 0.797 | 94.996 | 0.662 | 0.918 | 91.561 | 98.702 |
| MUT_NUPL2 | 0.794 | 95.276 | 0.701 | 0.890 | 92.303 | 98.489 |
| MYL9_GRAP2 | 0.830 | 95.275 | 0.723 | 0.945 | 92.857 | 97.647 |
| MYL9_KLF2 | 0.828 | 95.000 | 0.729 | 0.921 | 95.000 | 100.000 |
| NMI_MX1 | 0.707 | 95.147 | 0.594 | 0.847 | 88.000 | 100.000 |
| OBFC1_C6orf48 | 0.789 | 95.003 | 0.668 | 0.909 | 92.651 | 97.561 |
| PARL_PAFAH2 | 0.832 | 94.723 | 0.703 | 0.925 | 91.949 | 97.697 |
| PDGFC_CCND2 | 0.853 | 95.770 | 0.724 | 0.940 | 93.182 | 97.701 |
| PDGFC_FUT8 | 0.823 | 94.969 | 0.705 | 0.924 | 92.853 | 97.647 |
| PDGFC_IL7R | 0.859 | 95.136 | 0.740 | 0.935 | 92.218 | 97.755 |
| PDGFC_ITGB1 | 0.796 | 94.980 | 0.705 | 0.891 | 92.396 | 97.503 |
| PLEKHM2_SBF1 | 0.832 | 94.929 | 0.685 | 0.925 | 92.649 | 97.675 |
| PPP1CB_PAFAH2 | 0.805 | 94.706 | 0.658 | 0.915 | 91.856 | 97.622 |
| PROS1_MYOM2 | 0.793 | 95.000 | 0.671 | 0.901 | 95.000 | 100.000 |
| PROS1_WDR33 | 0.786 | 94.905 | 0.684 | 0.869 | 92.303 | 97.338 |
| PRPF40A_MRPS18B | 0.782 | 94.822 | 0.641 | 0.906 | 91.860 | 97.470 |
| PRRG4_GLOD4 | 0.838 | 95.228 | 0.735 | 0.935 | 92.292 | 97.673 |
| PSMB4_IMP3 | 0.832 | 95.047 | 0.704 | 0.927 | 91.744 | 98.703 |
| PSTPIP2_AKAP7 | 0.816 | 94.930 | 0.687 | 0.925 | 91.662 | 97.438 |
| PTPN2_CYP20A1 | 0.819 | 95.000 | 0.679 | 0.913 | 95.000 | 100.000 |
| PUS3_PAFAH2 | 0.832 | 95.234 | 0.710 | 0.936 | 92.121 | 98.686 |
| S100A12_POLR2C | 0.780 | 95.052 | 0.665 | 0.885 | 91.892 | 98.510 |
| S100P_GIMAP4 | 0.798 | 95.217 | 0.637 | 0.932 | 74.583 | 100.000 |
| S100P_HLA-DPA1 | 0.802 | 94.985 | 0.675 | 0.907 | 91.453 | 97.403 |
| S100P_IL7R | 0.842 | 94.982 | 0.724 | 0.941 | 92.130 | 97.702 |
| SH3BGRL_GLOD4 | 0.790 | 95.143 | 0.627 | 0.924 | 91.765 | 98.593 |
| SLC11A2_ID3 | 0.845 | 95.105 | 0.747 | 0.921 | 92.222 | 97.619 |
| SLC12A9_CTDSP2 | 0.829 | 95.177 | 0.733 | 0.915 | 92.674 | 98.633 |
| SLC25A37_FBXO7 | 0.816 | 95.088 | 0.713 | 0.931 | 91.755 | 98.668 |
| SLC2A3_ADAM19 | 0.813 | 94.857 | 0.650 | 0.914 | 91.458 | 97.535 |
| SLC2A3_MFSD10 | 0.772 | 94.829 | 0.611 | 0.882 | 91.870 | 97.470 |
| SLC39A8_CCND2 | 0.865 | 94.713 | 0.759 | 0.952 | 91.489 | 97.676 |
| SLC39A8_IL7R | 0.852 | 95.299 | 0.719 | 0.938 | 91.949 | 97.620 |
| SLC39A8_LFNG | 0.806 | 94.936 | 0.655 | 0.921 | 92.378 | 97.439 |
| SLC39A8_WDR33 | 0.816 | 95.142 | 0.677 | 0.947 | 92.676 | 98.702 |
| SNAPCI_IL7R | 0.800 | 95.001 | 0.674 | 0.915 | 92.570 | 98.688 |
| SORT1_CNBP | 0.857 | 94.991 | 0.758 | 0.940 | 92.905 | 97.620 |
| SORT1_INPP1 | 0.811 | 94.668 | 0.698 | 0.910 | 92.027 | 96.631 |
| SORT1_NAGK | 0.801 | 94.573 | 0.688 | 0.909 | 92.093 | 97.372 |
| SORT1_OSBPL9 | 0.825 | 95.073 | 0.682 | 0.941 | 92.126 | 98.766 |
| SORT1_PDCD5 | 0.830 | 95.024 | 0.706 | 0.933 | 92.303 | 97.702 |
| SORT1_PPP1R11 | 0.792 | 95.009 | 0.682 | 0.926 | 91.463 | 97.531 |
| SORT1_SASH3 | 0.792 | 95.434 | 0.648 | 0.909 | 92.674 | 98.650 |
| SORT1_TINF2 | 0.795 | 94.799 | 0.650 | 0.917 | 91.954 | 97.561 |
| ST3GAL6_KLRF1 | 0.812 | 95.008 | 0.702 | 0.918 | 91.954 | 97.592 |
| TAX1BP1_NUPL2 | 0.802 | 94.928 | 0.689 | 0.901 | 91.458 | 97.503 |
| TIMP1_EMP3 | 0.804 | 95.149 | 0.694 | 0.903 | 92.308 | 98.631 |
| TIMP1_IL7R | 0.848 | 94.932 | 0.751 | 0.928 | 92.500 | 97.532 |
| TLR5_CPVL | 0.777 | 94.789 | 0.645 | 0.906 | 91.239 | 97.522 |
| TLR5_CTSH | 0.658 | 94.708 | 0.517 | 0.808 | 75.000 | 100.000 |
| TLR5_DIAPH2 | 0.558 | 94.871 | 0.385 | 0.738 | 74.583 | 100.000 |
| TLR5_ENO1 | 0.666 | 95.005 | 0.499 | 0.805 | 77.639 | 100.000 |
| TLR5_FGL2 | 0.788 | 94.815 | 0.652 | 0.892 | 91.122 | 98.593 |
| TLR5_FTL | 0.705 | 95.000 | 0.557 | 0.852 | 91.063 | 98.362 |
| TLR5_FUT8 | 0.841 | 94.932 | 0.715 | 0.939 | 91.760 | 97.592 |
| TLR5_GBP2 | 0.667 | 94.997 | 0.499 | 0.856 | 80.000 | 100.000 |
| TLR5_HIST1H2BM | 0.727 | 94.972 | 0.589 | 0.870 | 91.045 | 98.462 |
| TLR5_HIST1H3C | 0.660 | 95.055 | 0.501 | 0.785 | 87.458 | 100.000 |
| TLR5_HIST1H4L | 0.711 | 95.181 | 0.562 | 0.839 | 87.500 | 100.000 |
| TLR5_HLA-DPA1 | 0.828 | 94.893 | 0.715 | 0.940 | 92.385 | 97.641 |
| TLR5_IFIT1 | 0.756 | 95.063 | 0.603 | 0.906 | 81.818 | 100.000 |
| TLR5_IFNGR2 | 0.630 | 94.879 | 0.476 | 0.754 | 83.333 | 100.000 |
| TLR5_ITGB1 | 0.788 | 94.871 | 0.657 | 0.888 | 91.760 | 97.436 |
| TLR5_MX1 | 0.768 | 94.964 | 0.613 | 0.910 | 92.192 | 98.650 |
| TLR5_NMI | 0.644 | 94.892 | 0.522 | 0.773 | 89.730 | 100.000 |
| TLR5_PLAC8 | 0.640 | 94.258 | 0.491 | 0.802 | 88.537 | 100.000 |
| TLR5_RDX | 0.712 | 95.106 | 0.551 | 0.853 | 87.473 | 100.000 |
| TLR5_SDHC | 0.678 | 95.081 | 0.532 | 0.805 | 88.889 | 100.000 |
| TLR5_SLAMF7 | 0.681 | 95.347 | 0.524 | 0.840 | 89.617 | 100.000 |
| TLR5_ST3GAL5 | 0.808 | 94.993 | 0.693 | 0.925 | 92.209 | 98.704 |
| TLR5_TMEM106C | 0.767 | 95.122 | 0.603 | 0.890 | 92.208 | 97.487 |
| TLR5_TPP2 | 0.811 | 95.247 | 0.671 | 0.933 | 75.000 | 100.000 |
| TLR5_VAV1 | 0.692 | 95.083 | 0.556 | 0.833 | 66.667 | 100.000 |
| TMEM106C_IL7R | 0.683 | 94.808 | 0.562 | 0.797 | 91.379 | 98.214 |
| TMEM80_IMP3 | 0.818 | 94.948 | 0.697 | 0.917 | 92.561 | 97.562 |
| TPP2_IL7R | 0.658 | 95.008 | 0.515 | 0.782 | 83.333 | 100.000 |
| USP3_RNF34 | 0.808 | 95.276 | 0.702 | 0.918 | 92.948 | 98.593 |
| VAV1_IL7R | 0.805 | 94.652 | 0.694 | 0.886 | 91.949 | 97.561 |
| YPEL5_ARL2BP | 0.793 | 95.099 | 0.621 | 0.914 | 92.593 | 97.590 |
| ZBTB17_ID3 | 0.839 | 95.050 | 0.717 | 0.937 | 66.667 | 100.000 |

TABLE 7
Performance of 200 derived biomarkers at a set sepsis
prevalence of 5%. Performance measures include Area
Under Curve (AUC) and Negative Predictive Value (NPV).

| | | | AUC | AUC | NPV | NPV |
|---|---|---|---|---|---|---|
| Derived Biomarker | AUC | NPV | (upper) | (lower) | (lower) | (upper) |
| AIF1_HMGN4 | 0.797 | 95.000 | 0.610 | 0.924 | 95.000 | 95.000 |
| ALDOA_MAP4K2 | 0.808 | 95.038 | 0.621 | 0.956 | 95.000 | 95.000 |
| ATG9A_RAB11FIP3 | 0.810 | 95.019 | 0.674 | 0.924 | 95.000 | 95.000 |
| ATP13A3_IL7R | 0.846 | 95.038 | 0.692 | 0.971 | 95.000 | 95.000 |
| ATP6V0A1_RASSF7 | 0.832 | 95.096 | 0.686 | 0.960 | 95.000 | 95.960 |
| ATP8B4_CCND2 | 0.827 | 95.067 | 0.646 | 0.954 | 95.000 | 95.960 |
| CD44_GIMAP4 | 0.737 | 95.010 | 0.531 | 0.943 | 95.000 | 95.000 |
| CD44_HLA-DPA1 | 0.746 | 95.096 | 0.567 | 0.939 | 95.000 | 95.960 |
| CD44_IL7R | 0.779 | 95.125 | 0.595 | 0.943 | 95.000 | 95.960 |
| CD44_RPA2 | 0.780 | 95.058 | 0.604 | 0.931 | 95.000 | 95.960 |
| CD44_RPA2 | 0.777 | 95.058 | 0.528 | 0.943 | 95.000 | 95.960 |
| CD59_GIMAP4 | 0.831 | 95.086 | 0.632 | 0.956 | 95.000 | 95.960 |
| CDC14A_CCND2 | 0.594 | 95.003 | 0.333 | 0.832 | 94.949 | 95.000 |
| CDC14A_IL7R | 0.617 | 95.038 | 0.340 | 0.842 | 95.000 | 95.000 |
| CHPT1_FBXO7 | 0.813 | 95.048 | 0.676 | 0.937 | 95.000 | 95.048 |
| CHPT1_RANBP10 | 0.792 | 95.058 | 0.602 | 0.941 | 95.000 | 95.960 |
| CHPT1_RANBP10 | 0.800 | 95.058 | 0.584 | 0.960 | 95.000 | 95.960 |
| CLEC4E_MX1 | 0.704 | 95.086 | 0.439 | 0.941 | 95.000 | 95.960 |
| CLEC4E_MX1 | 0.751 | 95.086 | 0.496 | 0.950 | 95.000 | 95.960 |
| CLEC4E_SYNE2 | 0.780 | 95.010 | 0.556 | 0.929 | 94.949 | 95.000 |
| CLU_CCND2 | 0.749 | 95.053 | 0.591 | 0.895 | 94.898 | 95.920 |
| CLU_IL7R | 0.767 | 95.020 | 0.602 | 0.917 | 94.949 | 95.000 |
| COQ10B_TRAF3IP2 | 0.793 | 95.048 | 0.574 | 0.952 | 95.000 | 95.048 |
| COX5B_PHB | 0.846 | 95.000 | 0.703 | 0.975 | 95.000 | 95.000 |
| CPVL_IL7R | 0.695 | 95.048 | 0.498 | 0.897 | 95.000 | 95.048 |
| CTSA_DLST | 0.826 | 95.040 | 0.658 | 0.965 | 94.949 | 95.918 |
| CTSA_HMG20B | 0.815 | 95.010 | 0.665 | 0.950 | 95.000 | 95.000 |
| CTSC_CCND2 | 0.806 | 95.059 | 0.581 | 0.937 | 94.949 | 95.918 |
| CTSH_IL7R | 0.801 | 95.058 | 0.617 | 0.935 | 95.000 | 95.048 |
| CYBB_BRD7 | 0.794 | 95.010 | 0.619 | 0.939 | 95.000 | 95.000 |
| DERA_HMGN4 | 0.818 | 95.117 | 0.677 | 0.950 | 94.949 | 95.960 |
| DIAPH2_CCND2 | 0.878 | 95.043 | 0.728 | 0.979 | 94.949 | 95.918 |
| DIAPH2_HLA-DPA1 | 0.849 | 95.019 | 0.690 | 0.971 | 95.000 | 95.000 |
| DIAPH2_IL7R | 0.886 | 95.086 | 0.774 | 0.975 | 95.000 | 95.960 |
| DIAPH2_PHF3 | 0.815 | 95.038 | 0.623 | 0.933 | 95.000 | 95.000 |
| DIAPH2_RAB9A | 0.795 | 95.038 | 0.583 | 0.945 | 95.000 | 95.000 |
| DIAPH2_RNASE6 | 0.773 | 95.029 | 0.551 | 0.929 | 95.000 | 95.000 |
| DIAPH2_SERTAD2 | 0.850 | 95.049 | 0.701 | 0.947 | 94.949 | 95.918 |
| DIAPH2_ST3GAL5 | 0.832 | 95.000 | 0.633 | 0.962 | 95.000 | 95.000 |
| DIAPH2_STK38 | 0.781 | 95.029 | 0.627 | 0.901 | 95.000 | 95.000 |
| EIF4E2_C21orf59 | 0.808 | 95.046 | 0.644 | 0.933 | 94.898 | 95.918 |
| EMR1_AKT1 | 0.772 | 95.125 | 0.584 | 0.918 | 95.000 | 95.960 |
| ENO1_IL7R | 0.784 | 95.048 | 0.613 | 0.922 | 94.949 | 95.960 |
| FCER1G_CD44 | 0.731 | 95.014 | 0.519 | 0.893 | 94.949 | 95.000 |
| FCER1G_CDC14A | 0.843 | 95.000 | 0.720 | 0.952 | 95.000 | 95.000 |
| FCER1G_MX1 | 0.793 | 95.029 | 0.568 | 0.948 | 95.000 | 95.000 |
| FCER1G_SDHC | 0.667 | 95.034 | 0.421 | 0.870 | 94.949 | 95.048 |
| FLVCR2_KATNA1 | 0.835 | 95.029 | 0.671 | 0.967 | 95.000 | 95.000 |
| FTL_CCND2 | 0.733 | 95.068 | 0.534 | 0.900 | 94.898 | 95.918 |
| FTL_IL7R | 0.757 | 95.010 | 0.593 | 0.906 | 95.000 | 95.000 |
| FURIN_ADD1 | 0.842 | 95.000 | 0.707 | 0.945 | 95.000 | 95.000 |
| FURIN_BTG2 | 0.834 | 95.125 | 0.691 | 0.945 | 95.000 | 95.960 |
| FURIN_RANBP10 | 0.828 | 95.010 | 0.650 | 0.975 | 95.000 | 95.000 |
| FURIN_SH3GLB2 | 0.811 | 95.077 | 0.650 | 0.952 | 95.000 | 95.960 |
| FUT8_IL7R | 0.564 | 95.010 | 0.345 | 0.805 | 95.000 | 95.000 |
| FXR1_EIF4A2 | 0.836 | 95.000 | 0.678 | 0.954 | 95.000 | 95.000 |
| GAPDH_COMMD4 | 0.810 | 95.000 | 0.595 | 0.956 | 95.000 | 95.000 |
| GAPDH_PPP1CA | 0.787 | 95.058 | 0.623 | 0.918 | 95.000 | 95.960 |
| GAPDH_RPS6KB2 | 0.816 | 95.019 | 0.642 | 0.962 | 95.000 | 95.000 |
| GAS7_ADD1 | 0.805 | 95.000 | 0.628 | 0.958 | 95.000 | 95.000 |
| GAS7_RAB11FIP1 | 0.851 | 95.029 | 0.654 | 0.989 | 95.000 | 95.000 |
| GBP2_GIMAP4 | 0.810 | 95.039 | 0.648 | 0.931 | 94.898 | 95.918 |
| GBP2_HCP5 | 0.789 | 95.010 | 0.625 | 0.937 | 94.898 | 95.878 |
| GBP2_MX1 | 0.690 | 95.053 | 0.482 | 0.895 | 94.949 | 95.918 |
| GNS_PLEKHG3 | 0.829 | 95.000 | 0.670 | 0.958 | 95.000 | 95.000 |
| GNS_PLEKHG3 | 0.845 | 95.000 | 0.678 | 0.963 | 95.000 | 95.000 |
| GSTO1_RASGRP3 | 0.817 | 95.077 | 0.613 | 0.960 | 95.000 | 95.960 |
| GSTO1_SDF2L1 | 0.792 | 95.067 | 0.623 | 0.929 | 95.000 | 95.960 |
| HEBP1_SSBP2 | 0.824 | 94.924 | 0.656 | 0.958 | 79.333 | 100.000 |
| HIST1H2BM_CCND2 | 0.748 | 94.994 | 0.520 | 0.908 | 94.949 | 95.000 |
| HIST1H2BM_IL7R | 0.768 | 95.002 | 0.555 | 0.927 | 94.949 | 95.000 |
| HIST1H3C_IL7R | 0.793 | 95.000 | 0.627 | 0.912 | 95.000 | 100.000 |
| HOXB6_PAFAH2 | 0.829 | 95.063 | 0.656 | 0.945 | 94.949 | 95.920 |
| HSPA4_IMP3 | 0.813 | 95.000 | 0.616 | 0.950 | 95.000 | 95.000 |
| HSPA4_IMP3 | 0.818 | 95.000 | 0.636 | 0.947 | 95.000 | 95.000 |
| HSPA4_IMP3 | 0.819 | 95.000 | 0.658 | 0.935 | 95.000 | 95.000 |
| HSPA4_IMP3 | 0.825 | 95.000 | 0.669 | 0.947 | 95.000 | 95.000 |
| IFNGR2_CCND2 | 0.829 | 95.058 | 0.623 | 0.969 | 95.000 | 95.960 |
| IFNGR2_HLA-DPA1 | 0.807 | 95.010 | 0.605 | 0.960 | 95.000 | 95.000 |
| IFNGR2_IL7R | 0.830 | 95.048 | 0.638 | 0.958 | 95.000 | 95.048 |
| IMPDH1_BTG2 | 0.831 | 95.010 | 0.634 | 0.985 | 95.000 | 95.000 |
| IMPDH1_BTG2 | 0.840 | 95.010 | 0.679 | 0.979 | 95.000 | 95.000 |
| ITGAX_RASGRP2 | 0.813 | 95.003 | 0.612 | 0.952 | 94.949 | 95.000 |
| ITGB1_IL7R | 0.674 | 95.063 | 0.484 | 0.910 | 94.949 | 95.960 |
| LAMP1_HLA-DPA1 | 0.752 | 95.077 | 0.535 | 0.941 | 95.000 | 95.960 |
| LAMP1_IL7R | 0.777 | 95.029 | 0.600 | 0.935 | 95.000 | 95.000 |
| LHFPL2_ISG20 | 0.790 | 95.038 | 0.623 | 0.912 | 95.000 | 95.000 |
| LILRB3_IL7R | 0.808 | 95.010 | 0.602 | 0.952 | 95.000 | 95.000 |
| LTA4H_CCND2 | 0.822 | 95.097 | 0.686 | 0.950 | 94.949 | 95.920 |
| LTA4H_CERK | 0.789 | 95.106 | 0.624 | 0.939 | 95.000 | 95.960 |
| LTA4H_CPVL | 0.753 | 95.058 | 0.524 | 0.929 | 95.000 | 95.960 |
| LTA4H_RPS8 | 0.839 | 95.067 | 0.619 | 0.992 | 95.000 | 95.960 |
| LTA4H_ST3GAL5 | 0.754 | 95.010 | 0.549 | 0.941 | 95.000 | 95.000 |
| LTA4H_TMEM106C | 0.688 | 95.058 | 0.416 | 0.910 | 95.000 | 95.960 |
| LTA4H_WDR33 | 0.794 | 95.000 | 0.585 | 0.950 | 95.000 | 95.000 |
| LTF_MAP4K2 | 0.770 | 95.010 | 0.547 | 0.948 | 95.000 | 95.000 |
| MAPK14_GIMAP4 | 0.833 | 95.019 | 0.667 | 0.939 | 95.000 | 95.000 |
| MAPK14_IL7R | 0.823 | 95.058 | 0.689 | 0.931 | 95.000 | 95.960 |
| MAPK14_IL7R | 0.842 | 95.058 | 0.693 | 0.958 | 95.000 | 95.960 |
| MAPK14_IL7R | 0.828 | 95.058 | 0.659 | 0.949 | 95.000 | 95.960 |
| MAPK14_MX1 | 0.727 | 95.048 | 0.497 | 0.935 | 95.000 | 95.048 |
| MAPK8IP3_IMP3 | 0.817 | 95.029 | 0.624 | 0.964 | 95.000 | 95.000 |
| MCTP1_AMD1 | 0.836 | 95.048 | 0.681 | 0.969 | 95.000 | 95.048 |
| MCTP1_TOB1 | 0.847 | 95.230 | 0.667 | 0.954 | 95.000 | 95.960 |
| MEGF9_CCND2 | 0.790 | 95.061 | 0.577 | 0.949 | 94.949 | 95.918 |
| MEGF9_CDC14A | 0.752 | 95.067 | 0.547 | 0.929 | 95.000 | 95.960 |
| MEGF9_GIMAP4 | 0.760 | 95.004 | 0.561 | 0.941 | 94.949 | 95.000 |
| MEGF9_HLA-DPA1 | 0.769 | 95.063 | 0.535 | 0.945 | 94.949 | 95.918 |
| MEGF9_IL7R | 0.779 | 95.017 | 0.526 | 0.946 | 74.583 | 100.000 |
| METTL9_AKTIP | 0.814 | 95.001 | 0.665 | 0.929 | 94.898 | 95.000 |
| MICAL1_DHX16 | 0.808 | 95.029 | 0.600 | 0.935 | 95.000 | 95.000 |
| MICAL1_STK38 | 0.812 | 95.019 | 0.648 | 0.941 | 95.000 | 95.000 |
| MICAL1_STK38 | 0.817 | 95.019 | 0.658 | 0.931 | 95.000 | 95.000 |
| MMP8_CCND2 | 0.857 | 95.164 | 0.666 | 0.962 | 95.000 | 95.960 |
| MMP8_CD44 | 0.664 | 95.051 | 0.431 | 0.872 | 94.949 | 95.920 |
| MMP8_CTSC | 0.616 | 95.002 | 0.374 | 0.836 | 94.845 | 95.918 |
| MMP8_ENO1 | 0.629 | 95.049 | 0.423 | 0.861 | 94.898 | 95.878 |
| MMP8_FGL2 | 0.736 | 95.065 | 0.561 | 0.912 | 94.949 | 95.920 |
| MMP8_FTL | 0.674 | 95.056 | 0.390 | 0.845 | 94.898 | 95.918 |
| MMP8_FUT8 | 0.834 | 95.019 | 0.666 | 0.981 | 95.000 | 95.000 |
| MMP8_IL7R | 0.859 | 95.058 | 0.711 | 0.954 | 94.949 | 95.920 |
| MMP8_ITGB1 | 0.762 | 95.038 | 0.507 | 0.924 | 95.000 | 95.000 |
| MMP8_LAMP1 | 0.642 | 95.022 | 0.429 | 0.843 | 94.898 | 95.044 |
| MMP8_PLAC8 | 0.587 | 95.141 | 0.340 | 0.849 | 94.947 | 95.960 |
| MMP8_RPS8 | 0.856 | 95.058 | 0.667 | 0.969 | 95.000 | 95.960 |
| MMP8_SDHC | 0.651 | 95.006 | 0.460 | 0.847 | 94.898 | 95.000 |
| MMP8_ST3GAL5 | 0.765 | 95.048 | 0.602 | 0.922 | 95.000 | 95.000 |
| MMP8_TMEM106C | 0.813 | 95.000 | 0.595 | 0.960 | 95.000 | 95.000 |
| MMP8_TPP2 | 0.807 | 95.086 | 0.614 | 0.947 | 95.000 | 95.960 |
| MMP8_TPP2 | 0.792 | 95.086 | 0.601 | 0.945 | 95.000 | 95.960 |
| MMP8_VAV1 | 0.623 | 95.062 | 0.366 | 0.862 | 94.949 | 95.960 |
| MNT_KLF2 | 0.806 | 95.066 | 0.595 | 0.939 | 94.949 | 95.918 |
| MNT_SLC9A3R1 | 0.791 | 95.106 | 0.600 | 0.927 | 95.000 | 95.960 |
| MUT_NUPL2 | 0.789 | 95.010 | 0.625 | 0.916 | 95.000 | 95.000 |
| MUT_NUPL2 | 0.773 | 95.010 | 0.598 | 0.901 | 95.000 | 95.000 |
| MYL9_GRAP2 | 0.814 | 95.000 | 0.607 | 0.964 | 95.000 | 100.000 |
| MYL9_KLF2 | 0.834 | 95.000 | 0.678 | 0.937 | 95.000 | 100.000 |
| NMI_MX1 | 0.671 | 95.019 | 0.467 | 0.910 | 95.000 | 95.000 |
| OBFC1_C6orf48 | 0.802 | 95.108 | 0.526 | 0.966 | 94.949 | 95.960 |
| PARL_PAFAH2 | 0.830 | 95.010 | 0.675 | 0.968 | 95.000 | 95.000 |
| PARL_PAFAH2 | 0.819 | 95.010 | 0.646 | 0.947 | 95.000 | 95.000 |
| PDGFC_CCND2 | 0.848 | 95.048 | 0.698 | 0.956 | 95.000 | 95.048 |
| PDGFC_FUT8 | 0.823 | 95.086 | 0.601 | 0.956 | 95.000 | 95.960 |
| PDGFC_IL7R | 0.844 | 95.038 | 0.678 | 0.973 | 95.000 | 95.000 |
| PDGFC_ITGB1 | 0.778 | 95.038 | 0.611 | 0.922 | 95.000 | 95.000 |
| PLEKHM2_SBF1 | 0.825 | 95.084 | 0.669 | 0.935 | 94.845 | 95.918 |
| PPP1CB_PAFAH2 | 0.798 | 95.042 | 0.613 | 0.945 | 94.949 | 95.920 |
| PROS1_MYOM2 | 0.793 | 95.048 | 0.599 | 0.916 | 95.000 | 95.048 |
| PROS1_WDR33 | 0.788 | 95.058 | 0.612 | 0.917 | 95.000 | 95.960 |
| PRPF40A_MRPS18B | 0.796 | 95.048 | 0.575 | 0.948 | 95.000 | 95.048 |
| PRRG4_GLOD4 | 0.837 | 95.058 | 0.627 | 0.966 | 95.000 | 95.960 |
| PSMB4_IMP3 | 0.837 | 95.010 | 0.661 | 0.958 | 95.000 | 95.000 |
| PSTPIP2_AKAP7 | 0.825 | 95.010 | 0.672 | 0.962 | 95.000 | 95.000 |
| PTPN2_CYP20A1 | 0.824 | 95.048 | 0.664 | 0.954 | 95.000 | 95.048 |
| PUS3_PAFAH2 | 0.842 | 95.038 | 0.682 | 0.954 | 95.000 | 95.000 |
| S100A12_POLR2C | 0.783 | 95.048 | 0.618 | 0.923 | 95.000 | 95.000 |
| S100P_GIMAP4 | 0.780 | 95.019 | 0.568 | 0.956 | 95.000 | 95.000 |
| S100P_HLA-DPA1 | 0.804 | 95.000 | 0.620 | 0.947 | 95.000 | 95.000 |
| S100P_IL7R | 0.837 | 95.053 | 0.666 | 0.939 | 94.949 | 95.960 |
| SH3BGRL_GLOD4 | 0.788 | 95.058 | 0.596 | 0.950 | 95.000 | 95.960 |
| SLC11A2_ID3 | 0.814 | 94.998 | 0.625 | 0.944 | 94.898 | 95.000 |
| SLC12A9_CTDSP2 | 0.821 | 95.038 | 0.686 | 0.929 | 95.000 | 95.000 |
| SLC12A9_CTDSP2 | 0.815 | 95.038 | 0.669 | 0.949 | 95.000 | 95.000 |
| SLC25A37_FBXO7 | 0.808 | 95.048 | 0.614 | 0.944 | 95.000 | 95.048 |
| SLC25A37_FBXO7 | 0.804 | 95.048 | 0.665 | 0.950 | 95.000 | 95.048 |
| SLC25A37_FBXO7 | 0.802 | 95.048 | 0.612 | 0.956 | 95.000 | 95.048 |
| SLC2A3_ADAM19 | 0.795 | 95.010 | 0.599 | 0.937 | 95.000 | 95.000 |
| SLC2A3_MFSD10 | 0.790 | 95.099 | 0.613 | 0.929 | 94.949 | 95.960 |
| SLC39A8_CCND2 | 0.867 | 95.069 | 0.726 | 0.969 | 94.949 | 95.960 |
| SLC39A8_IL7R | 0.848 | 95.051 | 0.705 | 0.963 | 94.949 | 95.920 |
| SLC39A8_LFNG | 0.798 | 95.058 | 0.637 | 0.933 | 95.000 | 95.960 |
| SLC39A8_WDR33 | 0.819 | 95.019 | 0.660 | 0.958 | 95.000 | 95.000 |
| SNAPC1_IL7R | 0.816 | 95.000 | 0.644 | 0.967 | 95.000 | 95.000 |
| SORT1_CNBP | 0.849 | 94.997 | 0.703 | 0.954 | 94.949 | 95.000 |
| SORT1_INPP1 | 0.837 | 95.077 | 0.685 | 0.954 | 95.000 | 95.960 |
| SORT1_NAGK | 0.807 | 95.077 | 0.683 | 0.916 | 95.000 | 95.960 |
| SORT1_OSBPL9 | 0.847 | 95.038 | 0.617 | 0.981 | 95.000 | 95.000 |
| SORT1_PDCD5 | 0.815 | 95.010 | 0.614 | 0.977 | 95.000 | 95.000 |
| SORT1_PDCD5 | 0.841 | 95.010 | 0.610 | 0.966 | 95.000 | 95.000 |
| SORT1_PPP1R11 | 0.812 | 95.038 | 0.641 | 0.943 | 94.898 | 95.878 |
| SORT1_SASH3 | 0.781 | 95.009 | 0.613 | 0.935 | 94.949 | 95.000 |
| SORT1_TINF2 | 0.798 | 95.096 | 0.599 | 0.929 | 94.949 | 95.960 |
| ST3GAL6_KLRF1 | 0.820 | 95.077 | 0.661 | 0.960 | 95.000 | 95.960 |
| TAX1BP1_NUPL2 | 0.802 | 95.000 | 0.628 | 0.929 | 95.000 | 100.000 |
| TIMP1_EMP3 | 0.801 | 95.049 | 0.624 | 0.931 | 94.898 | 95.918 |
| TIMP1_IL7R | 0.839 | 95.000 | 0.703 | 0.944 | 95.000 | 100.000 |
| TLR5_CPVL | 0.789 | 95.086 | 0.626 | 0.918 | 95.000 | 95.960 |
| TLR5_CTSH | 0.664 | 95.019 | 0.448 | 0.835 | 94.949 | 95.000 |
| TLR5_DIAPH2 | 0.553 | 95.035 | 0.328 | 0.761 | 94.444 | 95.831 |
| TLR5_ENO1 | 0.662 | 95.002 | 0.457 | 0.861 | 94.949 | 95.000 |
| TLR5_FGL2 | 0.792 | 95.163 | 0.644 | 0.933 | 95.000 | 95.960 |
| TLR5_FTL | 0.707 | 94.996 | 0.533 | 0.872 | 94.898 | 95.000 |
| TLR5_FUT8 | 0.862 | 95.048 | 0.701 | 0.962 | 95.000 | 95.048 |
| TLR5_GBP2 | 0.663 | 95.185 | 0.425 | 0.870 | 94.949 | 95.960 |
| TLR5_HIST1H2BM | 0.722 | 94.990 | 0.469 | 0.923 | 94.949 | 95.000 |
| TLR5_HIST1H3C | 0.637 | 95.242 | 0.409 | 0.820 | 94.565 | 96.705 |
| TLR5_HIST1H4L | 0.711 | 95.029 | 0.484 | 0.900 | 95.000 | 95.000 |
| TLR5_HLA-DPA1 | 0.848 | 95.067 | 0.663 | 0.966 | 95.000 | 95.960 |
| TLR5_IFIT1 | 0.759 | 95.038 | 0.543 | 0.933 | 95.000 | 95.000 |
| TLR5_IFNGR2 | 0.613 | 94.983 | 0.427 | 0.768 | 94.898 | 95.000 |
| TLR5_ITGB1 | 0.779 | 95.010 | 0.546 | 0.933 | 95.000 | 95.000 |
| TLR5_ITGB1 | 0.786 | 95.010 | 0.583 | 0.943 | 95.000 | 95.000 |
| TLR5_MX1 | 0.756 | 95.307 | 0.524 | 0.935 | 95.000 | 95.960 |
| TLR5_NMI | 0.681 | 95.028 | 0.418 | 0.878 | 94.681 | 95.833 |
| TLR5_PLAC8 | 0.640 | 94.769 | 0.455 | 0.836 | 80.000 | 100.000 |
| TLR5_RDX | 0.699 | 95.077 | 0.456 | 0.901 | 95.000 | 95.960 |
| TLR5_SDHC | 0.641 | 94.983 | 0.391 | 0.844 | 94.898 | 95.000 |
| TLR5_SLAMF7 | 0.706 | 95.144 | 0.482 | 0.879 | 95.000 | 95.960 |
| TLR5_ST3GAL5 | 0.821 | 95.115 | 0.669 | 0.960 | 95.000 | 95.960 |
| TLR5_TMEM106C | 0.752 | 95.002 | 0.576 | 0.939 | 94.949 | 95.000 |
| TLR5_TPP2 | 0.812 | 95.010 | 0.631 | 0.951 | 95.000 | 95.000 |
| TLR5_VAV1 | 0.677 | 95.284 | 0.446 | 0.868 | 94.949 | 95.960 |
| TMEM106C_IL7R | 0.666 | 95.004 | 0.492 | 0.872 | 94.949 | 95.000 |
| TMEM80_IMP3 | 0.795 | 95.086 | 0.625 | 0.946 | 95.000 | 95.960 |
| TPP2_IL7R | 0.659 | 95.000 | 0.460 | 0.870 | 95.000 | 95.000 |
| USP3_RNF34 | 0.812 | 94.999 | 0.655 | 0.935 | 94.949 | 95.000 |
| VAVl_IL7R | 0.798 | 95.010 | 0.644 | 0.937 | 95.000 | 95.000 |
| YPEL5_ARL2BP | 0.793 | 95.006 | 0.621 | 0.942 | 94.949 | 95.000 |
| ZBTB17_ID3 | 0.831 | 95.067 | 0.627 | 0.960 | 95.000 | 95.960 |

TABLE 8
Table of calculated negative predictive values (NPV) for the final triage signature
(DIAPH2 / SERTAD2; PARL / PAFAH2; SORT1 / OSBPL9) at sepsis prevalences of 4, 6, 8 and 10%.
Based on the scientific literature, the prevalence of sepsis in the ER is approximately 4%. For
these calculations the sensitivity and specificity were set at 0.9535 and 0.7303 respectively based
on the ROC curve for the final triage signature (see Figure 1b).

| Sepsis Prevalence | Sensitivity | Specificity | NPV |
|---|---|---|---|
| 4% | 0.9535 | 0.7303 | 0.99735 |
| 6% | 0.9535 | 0.7303 | 0.99595 |
| 8% | 0.9535 | 0.7303 | 0.99449 |
| 10% | 0.9535 | 0.7303 | 0.99297 |

TABLE 9
List of numerators and denominators that appear more
than once in the top 200 derived biomarkers.

| Numerator | Times | Denominator | Times |
|---|---|---|---|
| Symbol | Appearing | Symbol | Appearing |
| TLR5 | 25 | IL7R | 27 |
| MMP8 | 17 | CCND2 | 13 |
| DIAPH2 | 9 | HLA-DPA1 | 7 |
| SORT1 | 8 | GIMAP4 | 6 |
| LTA4H | 7 | MX1 | 6 |
| MEGF9 | 5 | IMP3 | 4 |
| CD44 | 4 | PAFAH2 | 4 |
| FCER1G | 4 | ST3GAL5 | 4 |
| FURIN | 4 | FUT8 | 3 |
| PDGFC | 4 | ITGB1 | 3 |
| SLC39A8 | 4 | SDHC | 3 |
| GAPDH | 3 | TMEM106C | 3 |
| GBP2 | 3 | WDR33 | 3 |
| IFNGR2 | 3 | ADD1 | 2 |
| MAPK14 | 3 | BTG2 | 2 |
| MNT | 3 | CD44 | 2 |
| S100P | 3 | CDC14A | 2 |
| CDC14A | 2 | CPVL | 2 |
| CHPT1 | 2 | EN01 | 2 |
| CLEC4E | 2 | FBX07 | 2 |
| CLU | 2 | FGL2 | 2 |
| CTSA | 2 | FTL | 2 |
| FTL | 2 | GLOD4 | 2 |
| GAS7 | 2 | HMGN4 | 2 |
| GSTO1 | 2 | ID3 | 2 |
| HIST1H2BM | 2 | KLF2 | 2 |
| LAMP1 | 2 | MAP4K2 | 2 |
| MCTP1 | 2 | NUPL2 | 2 |
| MICAL1 | 2 | PLAC8 | 2 |
| MYL9 | 2 | RANBP10 | 2 |
| PROS1 | 2 | RPS8 | 2 |
| TIMP1 | 2 | STK38 | 2 |
| | | TPP2 | 2 |
| | | VAV1 | 2 |

TABLE 10
SEQ ID numbers, HUGO gene symbol and
Ensembl ID of individual biomarkers.

| SEQ | | |
|---|---|---|
| ID# | Symbol | Ensembl |
| 1 | ADAM19 | ENST00000257527 |
| 2 | ADD1 | ENST00000398129 |
| 3 | ADGRE1 | ENST00000312053 |
| 4 | AIF1 | ENST00000440907 |
| 5 | AKAP7 | ENST00000342266 |
| 6 | AKT1 | ENST00000555528 |
| 7 | AKTIP | ENST00000394657 |
| 8 | ALDOA | ENST00000338110 |
| 9 | AMD1 | ENST00000368885 |
| 10 | ARL2BP | ENST00000219204 |
| 11 | ATG9A | ENST00000396761 |
| 12 | ATP13A3 | ENST00000256031 |
| 13 | ATP6V0A1 | ENST00000393829 |
| 14 | ATP8B4 | ENST00000284509 |
| 15 | BRD7 | ENST00000394688 |
| 16 | BTG2 | ENST00000290551 |
| 17 | C21orf59 | ENST00000290155 |
| 18 | C6orf48 | ENST00000414434 |
| 19 | CCND2 | ENST00000261254 |
| 20 | CD44 | ENST00000428726 |
| 21 | CD59 | ENST00000395850 |
| 22 | CDC14A | ENST00000336454 |
| 23 | CERK | ENST00000216264 |
| 24 | CHPT1 | ENST00000229266 |
| 25 | CLEC4E | ENST00000299663 |
| 26 | CLU | ENST00000316403 |
| 27 | CNBP | ENST00000422453 |
| 28 | COMMD4 | ENST00000267935 |
| 29 | COQ10B | ENST00000263960 |
| 30 | COX5B | ENST00000258424 |
| 31 | CPVL | ENST00000396276 |
| 32 | CTDSP2 | ENST00000398073 |
| 33 | CTSA | ENST00000372484 |
| 34 | CTSC | ENST00000227266 |
| 35 | CTSH | ENST00000220166 |
| 36 | CYBB | ENST00000378588 |
| 37 | CYP20A1 | ENST00000356079 |
| 38 | DERA | ENST00000428559 |
| 39 | DHX16 | ENST00000451456 |
| 40 | DIAPH2 | ENST00000324765 |
| 41 | DLST | ENST00000334220 |
| 42 | EIF4A2 | ENST00000323963 |
| 43 | EIF4E2 | ENST00000258416 |
| 44 | EMP3 | ENST00000270221 |
| 45 | ENO1 | ENST00000234590 |
| 46 | FBXO7 | ENST00000266087 |
| 47 | FCER1G | ENST00000289902 |
| 48 | FGL2 | ENST00000248598 |
| 49 | FLVCR2 | ENST00000238667 |
| 50 | FTL | ENST00000331825 |
| 51 | FURIN | ENST00000268171 |
| 52 | FUT8 | ENST00000557164 |
| 53 | FXR1 | ENST00000357559 |
| 54 | GAPDH | ENST00000229239 |
| 55 | GAS7 | ENST00000580865 |
| 56 | GBP2 | ENST00000370466 |
| 57 | GIMAP4 | ENST00000255945 |
| 58 | GLOD4 | ENST00000301329 |
| 59 | GNS | ENST00000258145 |
| 60 | GRAP2 | ENST00000344138 |
| 61 | GSTO1 | ENST00000369713 |
| 62 | HEBP1 | ENST00000014930 |
| 63 | HIST1H2BM | ENST00000621112 |
| 64 | HIST1H3C | ENST00000612966 |
| 65 | HIST1H4L | ENST00000618305 |
| 66 | HLA-DPA1 | ENST00000383224 |
| 67 | HMG20B | ENST00000333651 |
| 68 | HMGN4 | ENST00000377575 |
| 69 | HOXB6 | ENST00000225648 |
| 70 | HSPA4 | ENST00000304858 |
| 71 | ID3 | ENST00000374561 |
| 72 | IFIT1 | ENST00000371804 |
| 73 | IFNGR2 | ENST00000290219 |
| 74 | IL7R | ENST00000303115 |
| 75 | IMP3 | ENST00000403490 |
| 76 | IMPDH1 | ENST00000338791 |
| 77 | INPP1 | ENST00000322522 |
| 78 | ISG20 | ENST00000306072 |
| 79 | ITGAX | ENST00000268296 |
| 80 | ITGB1 | ENST00000302278 |
| 81 | KATNA1 | ENST00000367411 |
| 82 | KLF2 | ENST00000248071 |
| 83 | KLRF1 | ENST00000617889 |
| 84 | LAMP1 | ENST00000332556 |
| 85 | LFNG | ENST00000402045 |
| 86 | LHFPL2 | ENST00000380345 |
| 87 | LILRB3 | ENST00000617251 |
| 88 | LTA4H | ENST00000228740 |
| 89 | LTF | ENST00000231751 |
| 90 | MAP4K2 | ENST00000294066 |
| 91 | MAPK14 | ENST00000229795 |
| 92 | MAPK8IP3 | ENST00000250894 |
| 93 | MCTP1 | ENST00000515393 |
| 94 | MEGF9 | ENST00000373930 |
| 95 | METTL9 | ENST00000358154 |
| 96 | MFSD10 | ENST00000329687 |
| 97 | MICAL1 | ENST00000358807 |
| 98 | MMP8 | ENST00000236826 |
| 99 | MNT | ENST00000174618 |
| 100 | MRPS18B | ENST00000412451 |
| 101 | MUT | ENST00000274813 |
| 102 | MX1 | ENST00000398598 |
| 103 | MYL9 | ENST00000279022 |
| 104 | MYOM2 | ENST00000616680 |
| 105 | NAGK | ENST00000613852 |
| 106 | NMI | ENST00000243346 |
| 107 | NUPL2 | ENST00000258742 |
| 108 | OBFC1 | ENST00000224950 |
| 109 | OSBPL9 | ENST00000428468 |
| 110 | PAFAH2 | ENST00000374282 |
| 111 | PARL | ENST00000317096 |
| 112 | PDCD5 | ENST00000590247 |
| 113 | PDGFC | ENST00000502773 |
| 114 | PHB | ENST00000300408 |
| 115 | PHF3 | ENST00000393387 |
| 116 | PLAC8 | ENST00000311507 |
| 117 | PLEKHG3 | ENST00000247226 |
| 118 | PLEKHM2 | ENST00000375799 |
| 119 | POLR2C | ENST00000219252 |
| 120 | PPP1CA | ENST00000376745 |
| 121 | PPP1CB | ENST00000395366 |
| 122 | PPP1R11 | ENST00000431424 |
| 123 | PROS1 | ENST00000394236 |
| 124 | PRPF40A | ENST00000410080 |
| 125 | PRRG4 | ENST00000257836 |
| 126 | PSMB4 | ENST00000290541 |
| 127 | PSTPIP2 | ENST00000409746 |
| 128 | PTPN2 | ENST00000309660 |
| 129 | PUS3 | ENST00000227474 |
| 130 | RAB11FIP1 | ENST00000287263 |
| 131 | RAB11FIP3 | ENST00000611004 |
| 132 | RAB9A | ENST00000464506 |
| 133 | RANBP10 | ENST00000317506 |
| 134 | RASGRP2 | ENST00000354024 |
| 135 | RASGRP3 | ENST00000407811 |
| 136 | RASSF7 | ENST00000622100 |
| 137 | RDX | ENST00000343115 |
| 138 | RNASE6 | ENST00000304677 |
| 139 | RNF34 | ENST00000361234 |
| 140 | RPA2 | ENST00000373912 |
| 141 | RPS6KB2 | ENST00000312629 |
| 142 | RPS8 | ENST00000396651 |
| 143 | S100A12 | ENST00000368737 |
| 144 | S100P | ENST00000296370 |
| 145 | SASH3 | ENST00000356892 |
| 146 | SBF1 | ENST00000380817 |
| 147 | SDF2L1 | ENST00000248958 |
| 148 | SDHC | ENST00000367975 |
| 149 | SERTAD2 | ENST00000313349 |
| 150 | SH3BGRL | ENST00000373212 |
| 151 | SH3GLB2 | ENST00000372564 |
| 152 | SLAMF7 | ENST00000368043 |
| 153 | SLC11A2 | ENST00000262052 |
| 154 | SLC12A9 | ENST00000354161 |
| 155 | SLC25A37 | ENST00000519973 |
| 156 | SLC2A3 | ENST00000075120 |
| 157 | SLC39A8 | ENST00000394833 |
| 158 | SLC9A3R1 | ENST00000262613 |
| 159 | SNAPC1 | ENST00000216294 |
| 160 | SORT1 | ENST00000256637 |
| 161 | SSBP2 | ENST00000320672 |
| 162 | ST3GAL5 | ENST00000377332 |
| 163 | ST3GAL6 | ENST00000394162 |
| 164 | STK38 | ENST00000229812 |
| 165 | SYNE2 | ENST00000344113 |
| 166 | TAX1BP1 | ENST00000396319 |
| 167 | TIMP1 | ENST00000218388 |
| 168 | TINF2 | ENST00000399423 |
| 169 | TLR5 | ENST00000366881 |
| 170 | TMEM106C | ENST00000552561 |
| 171 | TMEM80 | ENST00000397510 |
| 172 | TOB1 | ENST00000499247 |
| 173 | TPP2 | ENST00000376065 |
| 174 | TRAF3IP2 | ENST00000340026 |
| 175 | USP3 | ENST00000380324 |
| 176 | VAV1 | ENST00000602142 |
| 177 | WDR33 | ENST00000322313 |
| 178 | YPEL5 | ENST00000261353 |
| 179 | ZBTB17 | ENST00000375743 |

TABLE 11
SEQ ID numbers, HUGO gene symbol and
Ensembl ID of individual biomarkers.

| SEQ | | |
|---|---|---|
| ID# | Symbol | Genbank |
| 180 | ADAM19 | NP_150377 |
| 181 | ADD1 | NP_001110 |
| 182 | ADGRE1 | NP_001965 |
| 183 | AIF1 | NP_001614 |
| 184 | AKAP7 | NP_004833 |
| 185 | AKT1 | NP_005154 |
| 186 | AKTIP | NP_071921 |
| 187 | ALDOA | NP_000025 |
| 188 | AMD1 | NP_001625 |
| 189 | ARL2BP | NP_036238 |
| 190 | ATG9A | NP_076990 |
| 191 | ATP13A3 | NP_078800 |
| 192 | ATP6V0A1 | NP_005168 |
| 193 | ATP8B4 | NP_079113 |
| 194 | BRD7 | NP_037395 |
| 195 | BTG2 | NP_006754 |
| 196 | C21orf59 | NP_067077 |
| 197 | C6orf48 | NP_001035527 |
| 198 | CCND2 | NP_001750 |
| 199 | CD44 | NP_000601 |
| 200 | CD59 | NP_000602 |
| 201 | CDC14A | NP_003663 |
| 202 | CERK | NP_073603 |
| 203 | CHPT1 | NP_064629 |
| 204 | CLEC4E | NP_055173 |
| 205 | CLU | NP_001822 |
| 206 | CNBP | NP_003409 |
| 207 | COMMD4 | NP_060298 |
| 208 | COQ10B | NP_079423 |
| 209 | COX5B | NP_001853 |
| 210 | CPVL | NP_061902 |
| 211 | CTDSP2 | NP_005721 |
| 212 | CTSA | NP_000299 |
| 213 | CTSC | NP_001805 |
| 214 | CTSH | NP_004381 |
| 215 | CYBB | NP_000388 |
| 216 | CYP20A1 | NP_803882 |
| 217 | DERA | NP_057038 |
| 218 | DHX16 | NP_003578 |
| 219 | DIAPH2 | NP_006720 |
| 220 | DLST | NP_001924 |
| 221 | EIF4A2 | NP_001958 |
| 222 | EIF4E2 | NP_004837 |
| 223 | EMP3 | NP_001416 |
| 224 | ENO1 | NP_001419 |
| 225 | FBXO7 | NP_036311 |
| 226 | FCER1G | NP_004097 |
| 227 | FGL2 | NP_006673 |
| 228 | FLVCR2 | NP_060261 |
| 229 | FTL | NP_000137 |
| 230 | FURIN | NP_002560 |
| 231 | FUT8 | NP_004471 |
| 232 | FXR1 | NP_005078 |
| 233 | GAPDH | NP_002037 |
| 234 | GAS7 | NP_003635 |
| 235 | GBP2 | NP_004111 |
| 236 | GIMAP4 | NP_060796 |
| 237 | GLOD4 | NP_057164 |
| 238 | GNS | NP_002067 |
| 239 | GRAP2 | NP_004801 |
| 240 | GSTO1 | NP_004823 |
| 241 | HEBP1 | NP_057071 |
| 242 | HIST1H2BM | NP_003512 |
| 243 | HIST1H3C | NP_003522 |
| 244 | HIST1H4L | NP_003537 |
| 245 | HLA-DPA1 | NP_291032 |
| 246 | HMG20B | NP_006330 |
| 247 | HMGN4 | NP_006344 |
| 248 | HOXB6 | NP_061825 |
| 249 | HSPA4 | NP_002145 |
| 250 | ID3 | NP_002158 |
| 251 | IFIT1 | NP_001539 |
| 252 | IFNGR2 | NP_005525 |
| 253 | IL7R | NP_002176 |
| 254 | IMP3 | NP_060755 |
| 255 | IMPDH1 | NP_000874 |
| 256 | INPP1 | NP_002185 |
| 257 | ISG20 | NP_002192 |
| 258 | ITGAX | NP_000878 |
| 259 | ITGB1 | NP_002202 |
| 260 | KATNA1 | NP_008975 |
| 261 | KLF2 | NP_057354 |
| 262 | KLRF1 | NP_057607 |
| 263 | LAMP1 | NP_005552 |
| 264 | LFNG | NP_002295 |
| 265 | LHFPL2 | NP_005770 |
| 266 | LILRB3 | NP_006855 |
| 267 | LTA4H | NP_000886 |
| 268 | LTF | NP_002334 |
| 269 | MAP4K2 | NP_004570 |
| 270 | MAPK14 | NP_001306 |
| 271 | MAPK8IP3 | NP_055948 |
| 272 | MCTP1 | NP_078993 |
| 273 | MEGF9 | NP_001073966 |
| 274 | METTL9 | NP_057109 |
| 275 | MFSD10 | NP_001111 |
| 276 | MICAL1 | NP_073602 |
| 277 | MMP8 | NP_002415 |
| 278 | MNT | NP_064706 |
| 279 | MRPS18B | NP_054765 |
| 280 | MUT | NP_000246 |
| 281 | MX1 | NP_002453 |
| 282 | MYL9 | NP_006088 |
| 283 | MYOM2 | NP_003961 |
| 284 | NAGK | NP_060037 |
| 285 | NMI | NP_004679 |
| 286 | NUPL2 | NP_031368 |
| 287 | OBFC1 | NP_079204 |
| 288 | OSBPL9 | NP_078862 |
| 289 | PAFAH2 | NP_000428 |
| 290 | PARL | NP_061092 |
| 291 | PDCD5 | NP_004699 |
| 292 | PDGFC | NP_057289 |
| 293 | PHB | NP_002625 |
| 294 | PHF3 | NP_055968 |
| 295 | PLAC8 | NP_057703 |
| 296 | PLEKHG3 | NP_056364 |
| 297 | PLEKHM2 | NP_055979 |
| 298 | POLR2C | NP_116558 |
| 299 | PPP1CA | NP_002699 |
| 300 | PPP1CB | NP_002700 |
| 301 | PPP1R11 | NP_068778 |
| 302 | PROS1 | NP_000304 |
| 303 | PRPF40A | NP_060362 |
| 304 | PRRG4 | NP_076986 |
| 305 | PSMB4 | NP_002787 |
| 306 | PSTPIP2 | NP_077748 |
| 307 | PTPN2 | NP_002819 |
| 308 | PUS3 | NP_112597 |
| 309 | RAB11FIP1 | NP_079427 |
| 310 | RAB11FIP3 | NP_055515 |
| 311 | RAB9A | NP_004242 |
| 312 | RANBP10 | NP_065901 |
| 313 | RASGRP2 | NP_722541 |
| 314 | RASGRP3 | NP_056191 |
| 315 | RASSF7 | NP_003466 |
| 316 | RDX | NP_002897 |
| 317 | RNASE6 | NP_005606 |
| 318 | RNF34 | NP_079402 |
| 319 | RPA2 | NP_002937 |
| 320 | RPS6KB2 | NP_003943 |
| 321 | RPS8 | NP_001003 |
| 322 | S100A12 | NP_005612 |
| 323 | S100P | NP_005971 |
| 324 | SASH3 | NP_061863 |
| 325 | SBF1 | NP_002963 |
| 326 | SDF2L1 | NP_071327 |
| 327 | SDHC | NP_002992 |
| 328 | SERTAD2 | NP_055570 |
| 329 | SH3BGRL | NP_003013 |
| 330 | SH3GLB2 | NP_064530 |
| 331 | SLAMF7 | NP_067004 |
| 332 | SLC11A2 | NP_000608 |
| 333 | SLC12A9 | NP_064631 |
| 334 | SLC25A37 | NP_057696 |
| 335 | SLC2A3 | NP_008862 |
| 336 | SLC39A8 | NP_071437 |
| 337 | SLC9A3R1 | NP_004243 |
| 338 | SNAPC1 | NP_003073 |
| 339 | SORT1 | NP_002950 |
| 340 | SSBP2 | NP_036578 |
| 341 | ST3GAL5 | NP_003887 |
| 342 | ST3GAL6 | NP_006091 |
| 343 | STK38 | NP_009202 |
| 344 | SYNE2 | NP_055995 |
| 345 | TAX1BP1 | NP_006015 |
| 346 | TIMP1 | NP_003245 |
| 347 | TINF2 | NP_036593 |
| 348 | TLR5 | NP_003259 |
| 349 | TMEM106C | NP_076961 |
| 350 | TMEM80 | NP_777600 |
| 351 | TOB1 | NP_005740 |
| 352 | TPP2 | NP_003282 |
| 353 | TRAF3IP2 | NP_671733 |
| 354 | USP3 | NP_006528 |
| 355 | VAV1 | NP_005419 |
| 356 | WDR33 | NP_060853 |
| 357 | YPEL5 | NP_057145 |
| 358 | ZBTB17 | NP_003434 |

What is claimed is:

1. A method for determining an indicator used in assessing a likelihood of a subject presenting to emergency having an absence of BaSIRS, the method comprising, consisting or consisting essentially of: (1) determining biomarker values that are measured or derived for at least two (e.g., 2, 3, 4, 5, 6, 7, 8, 9, 10, or more) corresponding rule out (RO) BaSIRS biomarkers in a sample taken from the subject and that is at least partially indicative of the levels of the RO BaSIRS biomarkers in the sample; and (2) determining the indicator using the biomarker values.

2. A method for ruling out the likelihood of BaSIRS (i.e., for diagnosing the absence of BaSIRS), or not, for a subject presenting to emergency having an absence of BaSIRS, the method comprising, consisting or consisting essentially of: (1) determining biomarker values that are measured or derived for at least two (e.g., 2, 3, 4, 5, 6, 7, 8, 9, 10, or more) corresponding RO BaSIRS biomarkers in a sample taken from the subject and that is at least partially indicative of the levels of the RO BaSIRS biomarkers in the sample; (2) determining the indicator using the biomarker values; and (3) ruling out the likelihood of BaSIRS for the subject or not, based on the indicator.

3. The method of claim 1 or claim 2, wherein the subject has at least one clinical sign of systemic inflammatory response syndrome (SIRS).

4. The method of any one of claims 1 to 3, wherein at the least two RO BaSIRS biomarkers are not biomarkers of at least one other SIRS condition (e.g., 1, 2, 3, 4 or 5 other SIRS conditions) selected from the group consisting of: autoimmune disease associated SIRS (ADaSIRS), cancer associated SIRS (CANaSIRS), trauma associated SIRS (TRAUMaSIRS), anaphylaxis associated SIRS (ANAPHYLaSIRS), schizophrenia associated SIRS (SCHIZaSIRS) and virus associated SIRS (VaSIRS).

5. The method of any one of claims 1 to 3, wherein at the least two RO BaSIRS biomarkers are not biomarkers of any of the following SIRS conditions: ADaSIRS, CANaSIRS, TRAUMaSIRS, ANAPHYLaSIRS, SCHIZaSIRS and VaSIRS.

6. The method of any one of claims 1 to 5, wherein the sample is a biological sample.

7. The method of claim 6, wherein the biological sample is a blood sample.

8. The method of claim 7, wherein the blood sample is a peripheral blood sample.

9. The method of any one of claims 6 to 8, wherein the biological sample comprises leukocytes.

10. The method of any one of claims 1 to 9, wherein the at least two RO BaSIRS biomarkers are expression products of a gene selected from the group consisting of: ADAM19, ADD1, ADGRE1, AIF1, AKAP7, AKT1, AKTIP, ALDOA, AMD1, ARL2BP, ATG9A, ATP13A3, ATP6V0A1, ATP8B4, BRD7, BTG2, C21orf59, C6orf48, CCND2, CD44, CD59, CDC14A, CERK, CHPT1, CLEC4E, CLU, CNBP, COMMD4, COQ10B, COX5B, CPVL, CTDSP2, CTSA, CTSC, CTSH, CYBB, CYP20A1, DERA, DHX16, DIAPH2, DLST, EIF4A2, EIF4E2, EMP3, ENO1, FBXO7, FCER1G, FGL2, FLVCR2, FTL, FURIN, FUT8, FXR1, GAPDH, GAS7, GBP2, GIMAP4, GLOD4, GNS, GRAP2, GSTO1, HEBP1, HIST1H2BM, HIST1H3C, HIST1H4L, HLA-DPA1, HMG20B, HMGN4, HOXB6, HSPA4, ID3, IFIT1, IFNGR2, IL7R, IMP3, IMPDH1, INPP1, ISG20, ITGAX, ITGB1, KATNA1, KLF2, KLRF1, LAMP1, LFNG, LHFPL2, LILRB3, LTA4H, LTF, MAP4K2, MAPK14, MAPK8IP3, MCTP1, MEGF9, METTL9, MFSD10, MICAL1, MMP8, MNT, MRPS18B, MUT, MX1, MYL9, MYOM2, NAGK, NMI, NUPL2, OBFC1, OSBPL9, PAFAH2, PARL, PDCD5, PDGFC, PHB, PHF3, PLAC8, PLEKHG3, PLEKHM2, POLR2C, PPP1CA, PPP1CB, PPP1R11, PROS1, PRPF40A, PRRG4, PSMB4, PSTPIP2, PTPN2, PUS3, RAB11FIP1, RAB11FIP3, RAB9A, RANBP10, RASGRP2, RASGRP3, RASSF7, RDX, RNASE6, RNF34, RPA2, RPS6KB2, RPS8, S100A12, S100P, SASH3, SBF1, SDF2L1, SDHC, SERTAD2, SH3BGRL, SH3GLB2, SLAMF7, SLC11A2, SLC12A9, SLC25A37, SLC2A3, SLC39A8, SLC9A3R1, SNAPC1, SORT1, SSBP2, ST3GAL5, ST3GAL6, STK38, SYNE2, TAX1BP1, TIMP1, TINF2, TLR5, TMEM106C, TMEM80, TOB1, TPP2, TRAF3IP2, USP3, VAV1, WDR33, YPEL5, ZBTB17.

11. The method of claim 10, wherein an individual RO BaSIRS biomarker is selected from the group consisting of: (a) a polynucleotide expression product comprising a nucleotide sequence that shares at least 70% (or at least 71% to at least 99% and all integer percentages in between) sequence identity with the sequence set forth in any one of SEQ ID NO: 1-179, or a complement thereof; (b) a polynucleotide expression product comprising a nucleotide sequence that encodes a polypeptide comprising the amino acid sequence set forth in any one of SEQ ID NO: 180-358; (c) a polynucleotide expression product comprising a nucleotide sequence that encodes a polypeptide that shares at least 70% (or at least 71% to at least 99% and all integer percentages in between) sequence similarity or identity with at least a portion of the sequence set forth in SEQ ID NO: 180-358; (d) a polynucleotide expression product comprising a nucleotide sequence that hybridizes to the sequence of (a), (b), (c) or a complement thereof, under medium or high stringency conditions; (e) a polypeptide expression product comprising the amino acid sequence set forth in any one of SEQ ID NO: 180-358; and (f) a polypeptide expression product comprising an amino acid sequence that shares at least 70% (or at least 71% to at least 99% and all integer percentages in between) sequence similarity or identity with the sequence set forth in any one of SEQ ID NO: 180-358.

12. The method of claim 10 or claim 11, wherein an individual RO BaSIRS biomarker comprises, consists, or consists essentially of: a nucleotide sequence selected from the group consisting of SEQ ID NOs: 1-179.

13. The method of claim 10 or claim 11, wherein an individual RO BaSIRS biomarker comprises, consists or consists essentially of an amino acid sequence selected from the group consisting of SEQ ID NOs: 180-358.

14. The method of any one of claims 1 to 13, wherein at least one pair of RO BaSIRS biomarkers is used to determine the indicator.

15. The method of claim 14, wherein one biomarker of a biomarker pair is selected from Group A RO BaSIRS biomarkers and the other is selected from Group B RO BaSIRS biomarkers, wherein an individual Group A RO BaSIRS biomarker is an expression product of a gene selected from the group consisting of: DIAPH2, CYBB, SLC39A8, PRPF40A, MUT, NMI, PUS3, MNT, SLC11A2, FXR1, SNAPC1, PRRG4, SLAMF7, MAPK8IP3, GBP2, PPP1CB, TMEM80, HIST1H2BM, NAGK, HIST1H4L and wherein an individual Group B RO BaSIRS biomarker is an expression product of a gene selected from the group consisting of: SERTAD2, PHF3, BRD7, TOB1, MAP4K2, WDR33, BTG2, AMD1, RNASE6, RAB11FIP1, ADD1, HMG20B.

16. The method of claim 14 or claim 15, wherein one biomarker of a biomarker pair is selected from Group C RO BaSIRS biomarkers and the other is selected from Group D RO BaSIRS biomarkers, wherein an individual Group C RO BaSIRS biomarker is an expression product of a gene selected from the group consisting of: PARL, AIF1, PTPN2, COX5B, PSMB4, EIF4E2, RDX, DERA, CTSH, HSPA4, VAV1, PPP1CA, CPVL, PDCD5, and wherein an individual Group D RO BaSIRS biomarker is an expression product of a gene selected from the group consisting of: PAFAH2, IMP3, GLOD4, IL7R, ID3, KLRF1, SBF1, CCND2, LFNG, MRPS18B, HLA-DPA1, SLC9A3R1, HMGN4, C6orf48, ARL2BP, CDC14A, RPA2, ST3GAL5, EIF4A2, CERK, RASSF7, PHB, TRAF3IP2, KLF2, RAB11FIP3, C21orf59, SSBP2, GIMAP4, CYP20A1, RASGRP2, AKT1, HCP5, TPP2, SYNE2, FUT8, NUPL2, MYOM2, RPS8, RNF34, DLST, CTDSP2, EMP3, PLEKHG3, DHX16, RASGRP3, COMMD4, ISG20, POLR2C, SH3GLB2, SASH3, GRAP2, RPS6KB2, FGL2, AKAP7, SDF2L1, FBXO7, MX1, IFIT1, TMEM106C, RANBP10.

17. The method of any one of claims 14 to 16, wherein one biomarker of a biomarker pair is selected from Group E RO BaSIRS biomarkers and the other is selected from Group F RO BaSIRS biomarkers, wherein an individual Group E RO BaSIRS biomarker is an expression product of a gene selected from the group consisting of: SORT, GAS7, FLVCR2, TLR5, FCER1G, SLC2A3, S100A12, PSTPIP2, GNS, METTL9, MMP8, MAPK14, CD59, CLEC4E, MICAL1, MCTP1, GAPDH, IMPDH1, ATP8B4, EMR1, SLC12A9, S100P, IFNGR2, PDGFC, CTSA, ALDOA, ITGAX, GSTO1, LHFPL2, LTF, SDHC, TIMP1, LTA4H, USP3, MEGF9, FURIN, ATP6V0A1, PROS1, ATG9A, PLAC8, LAMP1, COQ10B, ST3GAL6, CTSC, ENO1, OBFC1, TAX1BP1, MYL9, HIST1H3C, ZBTB17, CHPT1, SLC25A37, PLEKHM2, LILRB3, YPEL5, FTL, SH3BGRL, HOXB6, PPP1R11, CLU, HEBP1, and wherein an individual Group F RO BaSIRS biomarker is an expression product of a gene selected from the group consisting of: OSBPL9, CD44, AKTIP, ATP13A3, ADAM19, KATNA1, STK38, TINF2, RAB9A, INPP1, CNBP, ITGB1, MFSD10.

18. The method of any one of claim 15, wherein biomarker values are measured or derived for a Group A RO BaSIRS biomarker and for a Group B RO BaSIRS biomarker, and the indicator is determined by combining the biomarker values.

19. The method of any one of claim 16, wherein biomarker values are measured or derived for a Group C RO BaSIRS biomarker and for a Group D RO BaSIRS biomarker, and the indicator is determined by combining the biomarker values.

20. The method of any one of claim 17, wherein biomarker values are measured or derived for a Group E RO BaSIRS biomarker and for a Group F RO BaSIRS biomarker, and the indicator is determined by combining the biomarker values.

21. The method of claim 15, wherein biomarker values are measured or derived for a Group A RO BaSIRS biomarker, for a Group B RO BaSIRS biomarker, for a Group C RO BaSIRS biomarker and for a Group D RO BaSIRS biomarker, and the indicator is determined by combining the biomarker values.

22. The method of claim 16, wherein biomarker values are measured or derived for a Group A RO BaSIRS biomarker, for a Group B RO BaSIRS biomarker, for a Group C RO BaSIRS biomarker, for a Group D RO BaSIRS biomarker, for a Group E RO BaSIRS biomarker, for a Group F RO BaSIRS biomarker, and the indicator is determined by combining the biomarker values.

23. The method of any one of claims 14 to 22, wherein the method further comprises combining the biomarker values using a combining function, wherein the combining function is at least one of: an additive model; a linear model; a support vector machine; a neural network model; a random forest model; a regression model; a genetic algorithm; an annealing algorithm; a weighted sum; a nearest neighbor model; and a probabilistic model.

24. The method of any one of claims 14 to 23, wherein the method comprises: (a) determining a pair of biomarker values, each biomarker value being a value measured or derived for at least one corresponding RO BaSIRS biomarker; (b) determining a derived biomarker value using the pair of biomarker values, the derived biomarker value being indicative of a ratio of concentrations of the pair of RO BaSIRS biomarkers; and determining the indicator using the derived marker value.

25. The method of claim 24, wherein biomarker values are measured or derived for a Group A RO BaSIRS biomarker and for a Group B RO BaSIRS biomarker to obtain the pair of biomarker values and the derived biomarker value is determined using the pair of biomarker values.

26. The method of claim 24, wherein biomarker values are measured or derived for a Group C RO BaSIRS biomarker and for a Group D RO BaSIRS biomarker to obtain the pair of biomarker values and the derived biomarker value is determined using the pair of biomarker values.

27. The method of claim 24, wherein biomarker values are measured or derived for a Group E RO BaSIRS biomarker and for a Group F RO BaSIRS biomarker to obtain the pair of biomarker values and the derived biomarker value is determined using the pair of biomarker values.

28. The method of any one of claims 14 to 27, wherein the method comprises: (a) determining a first derived biomarker value using a first pair of biomarker values, the first derived biomarker value being indicative of a ratio of concentrations of first and second RO BaSIRS biomarkers; (b) determining a second derived biomarker value using a second pair of biomarker values, the second derived biomarker value being indicative of a ratio of concentrations of third and fourth RO BaSIRS biomarkers; (c) determining a third derived biomarker value using a third pair of biomarker values, the third derived biomarker value being indicative of a ratio of concentrations of fifth and sixth RO BaSIRS biomarkers; and (d) determining the indicator by combining the first, second and third derived biomarker values.

29. The method of claim 28, wherein the first RO BaSIRS biomarker is selected from Group A RO BaSIRS biomarkers, the second RO BaSIRS biomarker is selected from Group B RO BaSIRS biomarkers, the third RO BaSIRS biomarker is selected from Group C RO BaSIRS biomarkers, the fourth RO BaSIRS biomarker is selected from Group D RO BaSIRS biomarkers, the fifth RO BaSIRS biomarker is selected from Group E RO BaSIRS biomarkers, and the sixth RO BaSIRS biomarker is selected from Group F RO BaSIRS biomarkers.

30. The method of claim 28 or claim 29, wherein the method comprises combining the biomarker values using a combining function, wherein the combining function is at least one of: an additive model; a linear model; a support vector machine; a neural network model; a random forest model; a regression model; a genetic algorithm; an annealing algorithm; a weighted sum; a nearest neighbor model; and a probabilistic model.

31. The method of any one of claims 14 to 30, wherein an individual pair of RO BaSIRS biomarkers has a mutual correlation in respect of ruling out BaSIRS that lies within a mutual correlation range, the mutual correlation range being between ±0.9 (or between ±0.8, ±0.7, ±0.6, ±0.5, ±0.4, ±0.3, ±0.2 or ±0.1) and the indicator has a performance value greater than or equal to a performance threshold representing the ability of the indicator to diagnose the absence of BaSIRS, wherein the performance threshold is indicative of an explained variance of at least 0.3.

32. The method of any one of claims 14 to 31, wherein an individual RO BaSIRS biomarker has a condition correlation with the absence of RO BaSIRS that lies outside a condition correlation range, wherein the condition correlation range is between ±0.3.

33. The method of any one of claims 14 to 31, wherein an individual RO BaSIRS biomarker has a condition correlation with the absence of BaSIRS that lies outside a condition correlation range, wherein the condition correlation range is at least one of ±0.9, ±0.8, ±0.7, ±0.6, ±0.5 or ±0.4.

34. The method of any one of claims 14 to 33, wherein the performance threshold is indicative of an explained variance of at least one of 0.4, 0.5, 0.6, 0.7, 0.8 and 0.9.

35. The method of any one of claims 14 to 34, wherein the Group A RO BaSIRS biomarker is an expression product of DIAPH2, the Group B RO BaSIRS biomarker is an expression product of SERTAD2, the Group C RO BaSIRS biomarker is an expression product of PARL, the Group D RO BaSIRS biomarker is an expression product of PAFAH2, the Group E RO BaSIRS biomarker is an expression product of SORT, and the Group F RO BaSIRS biomarker is an expression product of OSBPL9.

36. An apparatus for determining an indicator used in assessing a likelihood of a subject having an absence of BaSIRS, the apparatus comprising at least one electronic processing device that:
a) determines a pair of biomarker values, each biomarker value being a value measured or derived for at least one corresponding RO BaSIRS biomarker, as broadly described above and elsewhere herein, of a sample taken from the subject and being at least partially indicative of a concentration of the RO BaSIRS biomarker in the sample;
b) determines a derived biomarker value using the pair of biomarker values, the derived biomarker value being indicative of a ratio of concentrations of the pair of RO BaSIRS biomarkers; and
c) determines the indicator using the derived biomarker value.

37. A composition for determining an indicator used in assessing a likelihood of a subject having an absence of BaSIRS, the composition comprising, consisting, or consisting essentially of, at least one pair of cDNAs and at least one oligonucleotide primer or probe that hybridizes to an individual one of the cDNAs, wherein the at least one pair of cDNAs is selected from pairs of cDNA including a first pair, a second pair and a third pair of cDNAs, wherein the first pair comprises a Group A RO BaSIRS biomarker cDNA and a Group B RO BaSIRS biomarker cDNA, and wherein the second pair comprises a Group C RO BaSIRS biomarker cDNA and a Group D RO BaSIRS biomarker cDNA, and wherein the third pair comprises a Group E RO BaSIRS biomarker cDNA and a Group F RO BaSIRS biomarker cDNA, wherein an individual Group A RO BaSIRS biomarker is an expression product of a gene selected from the group consisting of: DIAPH2, CYBB, SLC39A8, PRPF40A, MUT, NMI, PUS3, MNT, SLC11A2, FXR1, SNAPC1, PRRG4, SLAMF7, MAPK8IP3, GBP2, PPP1CB, TMEM80, HIST1H2BM, NAGK, HIST1H4L, wherein an individual Group B RO BaSIRS biomarker is an expression product of a gene selected from the group consisting of: SERTAD2, PHF3, BRD7, TOB1, MAP4K2, WDR33, BTG2, AMD1, RNASE6, RAB11FIP1, ADD1, HMG20B, wherein an individual Group C RO BaSIRS biomarker is an expression product of a gene selected from the group consisting of: PARL, AIF1, PTPN2, COX5B, PSMB4, EIF4E2, RDX, DERA, CTSH, HSPA4, VAV1, PPP1CA, CPVL, PDCD5, wherein an individual Group D RO BaSIRS biomarker is an expression product of a gene selected from the group consisting of: PAFAH2, IMP3, GLOD4, IL7R, ID3, KLRF1, SBF1, CCND2, LFNG, MRPS18B, HLA-DPA1, SLC9A3R1, HMGN4, C6orf48, ARL2BP, CDC14A, RPA2, ST3GAL5, EIF4A2, CERK, RASSF7, PHB, TRAF3IP2, KLF2, RAB11FIP3, C21orf59, SSBP2, GIMAP4, CYP20A1, RASGRP2, AKT1, HCP5, TPP2, SYNE2, FUT8, NUPL2, MYOM2, RPS8, RNF34, DLST, CTDSP2, EMP3, PLEKHG3, DHX16, RASGRP3, COMMD4, ISG20, POLR2C, SH3GLB2, SASH3, GRAP2, RPS6KB2, FGL2, AKAP7, SDF2L1, FBXO7, MX1, IFIT1, TMEM106C, RANBP10, wherein an individual Group E RO BaSIRS biomarker is an expression product of a gene selected from the group consisting of: SORT1, GAS7, FLVCR2, TLR5, FCER1G, SLC2A3, S100A12, PSTPIP2, GNS, METTL9, MMP8, MAPK14, CD59, CLEC4E, MICAL1, MCTP1, GAPDH, IMPDH1, ATP8B4, EMR1, SLC12A9, S100P, IFNGR2, PDGFC, CTSA, ALDOA, ITGAX, GST1, LHFPL2, LTF, SDHC, TIMP1, LTA4H, USP3, MEGF9, FURIN, ATP6V0A1, PROS1, ATG9A, PLAC8, LAMP, COQ10B, ST3GAL6, CTSC, ENO1, OBFC1, TAX1BP1, MYL9, HIST1H3C, ZBTB17, CHPT1, SLC25A37, PLEKHM2, LILRB3, YPEL5, FTL, SH3BGRL, HOXB6, PPP1R11, CLU, HEBP1, and wherein an individual Group F RO BaSIRS biomarker is an expression product of a gene selected from the group consisting of: OSBPL9, CD44, AKTIP, ATP13A3, ADAM19, KATNA1, STK38, TINF2, RAB9A, INPP1, CNBP, ITGB1, MFSD10.

38. The composition of claim 37, comprising a population of cDNAs corresponding to mRNA derived from a cell or cell population.

39. The composition of claim 38, wherein the cell is a cell of the immune system.

40. The composition of claim 38, wherein the cell is a leukocyte.

41. The composition of any one of claims 38 to 40, wherein the cell population is blood.

42. The composition of any one of claims 38 to 40, wherein the cell population is peripheral blood.

43. The composition of any one of claims 38 to 42, wherein the at least one oligonucleotide primer or probe is hybridized to an individual one of the cDNAs.

44. The composition of any one of claims 38 to 43, further comprising a labeled reagent for detecting the cDNA.

45. The composition of claim 44, wherein the labeled reagent is a labeled said at least one oligonucleotide primer or probe.

46. The composition of claim 44, wherein the labeled reagent is a labeled said cDNA.

47. The composition of any one of claims 38 to 46, wherein the at least one oligonucleotide primer or probe is in a form other than a high density array.

48. A kit for determining an indicator which is indicative of the likelihood of the absence of BaSIRS, and on which the likelihood of BaSIRS is ruled out or not, the kit comprising, consisting or consisting essentially of at least one pair of reagents selected from reagent pairs including a first pair of reagents, a second pair of reagents and a third pair of reagents, wherein the first pair of reagents comprises (i) a reagent that allows quantification of a Group A RO BaSIRS biomarker; and (ii) a reagent that allows quantification of a Group B RO BaSIRS biomarker, wherein the second pair of reagents comprises: (iii) a reagent that allows quantification of a Group C RO BaSIRS biomarker; and (iv) a reagent that allows quantification of a Group D RO BaSIRS biomarker, and wherein the third pair of reagents comprises: (v) a reagent that allows quantification of a Group E RO BaSIRS biomarker; and (vi) a reagent that allows quantification of a Group F RO BaSIRS biomarker, wherein an individual Group A RO BaSIRS biomarker is an expression product of a gene selected from the group consisting of: DIAPH2, CYBB, SLC39A8, PRPF40A, MUT, NMI, PUS3, MNT, SLC11A2, FXR1, SNAPC1, PRRG4, SLAMF7, MAPK8IP3, GBP2, PPP1CB, TMEM80, HIST1H2BM, NAGK, HIST1H4L, wherein an individual Group B RO BaSIRS biomarker is an expression product of a gene selected from the group consisting of: SERTAD2, PHF3, BRD7, TOB1, MAP4K2, WDR33, BTG2, AMD1, RNASE6, RAB11FIP1, ADD1, HMG20B, wherein an individual Group C RO BaSIRS biomarker is an expression product of a gene selected from the group consisting of: PARL, AIF1, PTPN2, COX5B, PSMB4, EIF4E2, RDX, DERA, CTSH, HSPA4, VAV1, PPP1CA, CPVL, PDCD5, wherein an individual Group D RO BaSIRS biomarker is an expression product of a gene selected from the group consisting of: PAFAH2, IMP3, GLOD4, IL7R, ID3, KLRF1, SBF1, CCND2, LFNG, MRPS18B, HLA-DPA1, SLC9A3R1, HMGN4, C6orf48, ARL2BP, CDC14A, RPA2, ST3GAL5, EIF4A2, CERK, RASSF7, PHB, TRAF3IP2, KLF2, RAB11FIP3, C21orf59, SSBP2, GIMAP4, CYP20A1, RASGRP2, AKT1, HCP5, TPP2, SYNE2, FUT8, NUPL2, MYOM2, RPS8, RNF34, DLST, CTDSP2, EMP3, PLEKHG3, DHX16, RASGRP3, COMMD4, ISG20, POLR2C, SH3GLB2, SASH3, GRAP2, RPS6KB2, FGL2, AKAP7, SDF2L1, FBXO7, MX1, IFIT1, TMEM106C, RANBP10, wherein an individual Group E RO BaSIRS biomarker is an expression product of a gene selected from the group consisting of: SORT, GAS7, FLVCR2, TLR5, FCER1G, SLC2A3, S100A12, PSTPIP2, GNS, METTL9, MMP8, MAPK14, CD59, CLEC4E, MICAL1, MCTP1, GAPDH, IMPDH1, ATP8B4, EMR1, SLC12A9, S100P, IFNGR2, PDGFC, CTSA, ALDOA, ITGAX, GSTO1, LHFPL2, LTF, SDHC, TIMP1, LTA4H, USP3, MEGF9, FURIN, ATP6V0A1, PROS1, ATG9A, PLAC8, LAMP1, COQ10B, ST3GAL6, CTSC, ENO1, OBFC1, TAX1BP1, MYL9, HIST1H3C, ZBTB17, CHPT1, SLC25A37, PLEKHM2, LILRB3, YPEL5, FTL, SH3BGRL, HOXB6, PPP1R11, CLU, HEBP1, and wherein an individual Group F RO BaSIRS biomarker is an expression product of a gene selected from the group consisting of: OSBPL9, CD44, AKTIP, ATP13A3, ADAM19, KATNA1, STK38, TINF2, RAB9A, INPP1, CNBP, ITGB1, MFSD10.

49. A method for managing a subject with at least one clinical sign of SIRS, the method comprising, consisting or consisting essentially of: not exposing the subject to a treatment regimen for specifically treating BaSIRS based on an indicator obtained from an indicator-determining method, wherein the indicator is indicative of the absence of BaSIRS in the subject, and of ruling out the likelihood of the presence of BaSIRS in the subject, and wherein the indicator-determining method is an indicator-determining method according to any one of claims 1 to 35.

50. The method of claim 49, wherein when the indicator is indicative of the absence of BaSIRS in the subject, the method further comprises exposing the subject to a non-BaSIRS treatment.

51. The method of claim 50, wherein the non-BaSIRS treatment is a treatment for a SIRS other than BaSIRS (e.g., a treatment for ADaSIRS, CANaSIRS, TRAUMaSIRS, ANAPHYLaSIRS, SCHIZaSIRS and VaSIRS).

52. The method of claim 49, wherein when the indicator is indicative of the absence of BaSIRS in the subject, the methods further comprises not exposing the subject to a treatment.

53. The method of any one of claims 49 to 52, further comprising taking a sample from the subject and determining an indicator indicative of the likelihood of the absence of BaSIRS using the indicator-determining method.

54. The method of any one of claims 49 to 53, further comprising sending a sample taken from the subject to a laboratory at which the indicator is determined according to the indicator-determining method.

55. The method of claim 54, further comprising receiving the indicator from the laboratory.

The application's sequence listing, which the Patent Office published only in electronic form, follows.

SEQUENCE LISTING (358 sequences)

SEQ ID NO: 1 - DNA, 2757 bp, Homo sapiens
atgccagggggcgcaggcgccgcccggctctgcttgctggcgtttgccctgcagcccctccggccgcgggcggcgcgggagcctggatggacaagaggaagtgaggaaggcagccccaagctgcagcatgaacttatcatacctcagtggaagacttcagaaagccccgtgagagaaaagcatccactcaaagctgagctcagggtaatggctgaggggcgagaactgatcctggacctggagaagaatgagcaactttttgctccttcctacacagaaacccattatacttcaagtggtaaccctcaaaccaccacacggaaattggaggatcactgcttttaccacggcacggtgagggagacagaactgtccagcgtcacgctcagcacttgccgaggaattagaggactgattacggtgagcagcaacctcagctacgtcatcgagcccctccctgacagcaagggccaacaccttatttacagatctgaacatctcaagccgcccccgggaaactgtgggttcgagcactccaagcccaccaccagggactgggctcttcagtttacacaacagaccaagaagcgacctcgcaggatgaaaagggaagatttaaactccatgaagtatgtggagctttacctcgtggctgattatttagagtttcagaagaatcgacgagaccaggacgccaccaaacacaagctcatagagatcgccaactatgttgataagttttaccgatccttgaacatccggattgctctcgtgggcttggaagtgtggacccacgggaacatgtgtgaagtttcagagaatccatattctaccctctggtcctttctcagttggaggcgcaagctgcttgcccagaagtaccatgacaacgcccaattaatcacgggcatgtccttccacggcaccaccatcggcctggcccccctcatggccatgtgctctgtgtaccagtctggaggagtcaacatggaccactccgagaatgccattggcgtggctgccaccatggcccacgagatgggccacaactttggcatgacccatgattctgcagattgctgctcggccagtgcggctgatggtgggtgcatcatggcagctgccactgggcacccctttcccaaagtgttcaatggatgcaacaggagggagctggacaggtatctgcagtcaggtggtggaatgtgtctctccaacatgccagacaccaggatgttgtatggaggccggaggtgtgggaacgggtatctggaagatggggaagagtgtgactgtggagaagaagaggaatgtaacaacccctgctgcaatgcctctaattgtaccctgaggccgggggcggagtgtgctcacggctcctgctgccaccagtgtaagctgttggctcctgggaccctgtgccgcgagcaggccaggcagtgtgacctcccggagttctgtacgggcaagtctccccactgccctaccaacttctaccagatggatggtaccccctgtgagggcggccaggcctactgctacaacggcatgtgcctcacctaccaggagcagtgccagcagctgtggggacccggagcccgacctgcccctgacctctgcttcgagaaggtgaatgtggcaggagacacctttggaaactgtggaaaggacatgaatggtgaacacaggaagtgcaacatgagagatgcgaagtgtgggaagatccagtgtcagagctctgaggcccggcccctggagtccaacgcggtgcccattgacaccactatcatcatgaatgggaggcagatccagtgccggggcacccacgtctaccgaggtcctgaggaggagggtgacatgctggacccagggctggtgatgactggaaccaagtgtggctacaaccatatttgctttgaggggcagtgcaggaacacctccttctttgaaactgaaggctgtgggaagaagtgcaatggccatggggtctgtaacaacaaccagaactgccactgcctgccgggctgggccccgcccttctgcaacacaccgggccacgggggcagtatcgacagtgggcctatgccccctgagagtgtgggtcctgtggtagctggagtgttggtggccatcttggtgctggcggtcctcatgctgatgtactactgctgcagacagaacaacaaactaggccaactcaagccctcagctctcccttccaagctgaggcaacagttcagttgtcccttcagggtttctcagaacagcgggactggtcatgccaacccaactttcaagctgcagacgccccagggcaagcgaaaggtgatcaacactccggaaatcctgcggaagccctcccagcctcctccccggccccctccagattatctgcgtggtgggtccccacctgcaccactgccagctcacctgagcagggctgctaggaactccccagggcccgggtctcaaatagagaggacggagtcgtccaggaggcctcctccaagccggccaattccccccgcaccaaattgcatcgtttcccaggacttctccaggcctcggccgccccagaaggcactcccggcaaacccagtgccaggccgcaggagcctccccaggccaggaggtgcatccccactgcggccccctggtgctggccctcagcagtcccggcctctggcagcacttgccccaaagtttccagaatacagatcacagagggctggagggatgattagctcgaaaatctag

SEQ ID NO: 2 - DNA, 2214 bp, Homo sapiens
atgaatggtgattctcgtgctgcggtggtgacctcaccacccccgaccacagcccctcacaaggagaggtacttcgaccgagtagatgagaacaacccagagtacttgagggagaggaacatggcaccagaccttcgccaggacttcaacatgatggagcaaaagaagagggtgtccatgattctgcaaagccctgctttctgtgaagaattggaatcaatgatacaggagcaatttaagaaggggaagaaccccacaggcctattggcattacagcagattgcagattttatgaccacgaatgtaccaaatgtctacccagcagctccgcaaggagggatggctgccttaaacatgagtcttggtatggtgactcctgtgaacgatcttagaggatctgattctattgcgtatgacaaaggagagaagttattacggtgtaaattggcagcgttttatagactagcagatctctttgggtggtctcagcttatctacaatcatatcacaaccagagtgaactccgagcaggaacacttcctcattgtcccttttgggcttctttacagtgaagtgactgcatccagtttggttaagatcaatctacaaggagatatagtagatcgtggaagcactaatctgggagtgaatcaggccggcttcaccttacactctgcaatttatgctgcacgcccggacgtgaagtgcgtcgtgcacattcacaccccagcaggggctgcggtctctgcaatgaaatgtggcctcttgccaatctccccggaggcgctttcccttggagaagtggcttatcatgactaccatggcattctggttgatgaagaggaaaaagttttgattcagaaaaatctggggcctaaaagcaaggttcttattctccggaaccatgggctcgtgtcagttggagagagcgttgaggaggccttctattacatccataaccttgtggttgcctgtgagatccaggttcgaactctggccagtgcaggaggaccagacaacttagtcctgctgaatcctgagaagtacaaagccaagtcccgttccccagggtctccggtaggggaaggcactggatcgcctcccaagtggcagattggtgagcaggaatttgaagccctcatgcggatgctcgataatctgggctacagaactggctacccttatcgataccctgctctgagagagaagtctaaaaaatacagcgatgtggaggttcctgctagtgtcacaggttactcctttgctagtgacggtgattcgggcacttgctccccactcagacacagttttcagaagcagcagcgggagaagacaagatggctgaactctggccggggcgacgaagcttccgaggaagggcagaatggaagcagtcccaagtcgaagactaagtggactaaagaggatggacatagaacttccacctctgctgtccctaacctgtttgttccattgaacactaacccaaaagaggtccaggagatgaggaacaagatccgagagcagaatttacaggacattaagacggctggccctcagtcccaggttttgtgtggtgtagtgatggacaggagcctcgtccagggagagctggtgacggcctccaaggccatcattgaaaaggagtaccagccccacgtcattgtgagcaccacgggccccaaccccttcaccacactcacagaccgtgagctggaggagtaccgcagggaggtggagaggaagcagaagggctctgaagagaatctggacgaggctagagaacagaaagaaaagagtcctccagaccagcctgcggtcccccacccgcctcccagcactcccatcaagctggaggaagaccttgtgccggagccgactactggagatgacagtgatgctgccacctttaagccaactctccccgatctgtcccctgatgaaccttcagaagcactcggcttcccaatgttagagaaggaggaggaagcccatagacccccaagccccactgaggcccctactgaggccagccccgagccagccccagacccagccccggtggctgaagaggctgccccctcagctgtcgaggagggggccgccgcggaccctggcagcgatgggtctccaggcaagtccccgtccaaaaagaagaagaagttccgtaccccgtcctttctgaagaagagcaagaagaagagtgactcctga

SEQ ID NO: 3 - DNA, 2661 bp, Homo sapiens
atgcgtggcttcaacctgctcctcttctggggatgttgtgttatgcacagctgggaagggcacataagacccacacggaaaccaaacacaaagggtaataactgtagagacagtaccttgtgcccagcttatgccacctgcaccaatacagtggacagttactattgcgcttgcaaacaaggcttcctgtccagcaatgggcaaaatcacttcaaggatccaggagtgcgatgcaaagatattgatgaatgttctcaaagcccccagccctgtggtcctaactcatcctgcaaaaacctgtcagggaggtacaagtgcagctgtttagatggtttctcttctcccactggaaatgactgggtcccaggaaagccgggcaatttctcctgtactgatatcaatgagtgcctcaccagcagcgtctgccctgagcattctgactgtgtcaactccatgggaagctacagttgcagctgtcaagttggattcatctctagaaactccacctgtgaagacgtggatgaatgtgcagatccaagagcttgcccagagcatgcaacttgtaataacactgttggaaactactcttgtttctgcaacccaggatttgaatccagcagtggccacttgagtttccagggtctcaaagcatcgtgtgaagatattgatgaatgcactgaaatgtgccccatcaattcaacatgcaccaacactcctgggagctacttttgcacctgccaccctggctttgcaccaagcaatggacagttgaatttcacagaccaaggagtggaatgtagagatattgatgagtgccgccaagatccatcaacctgtggtcctaattctatctgcaccaatgccctgggctcctacagctgtggctgcattgcaggctttcatcccaatccagaaggctcccagaaagatggcaacttcagctgccaaagggttctcttcaaatgtaaggaagatgtgatacccgataataagcagatccagcaatgccaagagggaaccgcagtgaaacctgcatatgtctccttttgtgcacaaataaataacatcttcagcgttctggacaaagtgtgtgaaaataaaacgaccgtagtttctctgaagaatacaactgagagctttgtccctgtgcttaaacaaatatccacgtggactaaattcaccaaggaagagacgtcctccctggccacagtcttcctggagagtgtggaaagcatgacactggcatctttttggaaaccctcagcaaatatcactccggctgttcggacggaatacttagacattgagagcaaagttatcaacaaagaatgcagtgaagagaatgtgacgttggacttggtagccaagggggataagatgaagatcgggtgttccacaattgaggaatctgaatccacagagaccactggtgtggcttttgtctcctttgtgggcatggaatcggttttaaatgagcgcttcttcaaagaccaccaggctcccttgaccacctctgagatcaagctgaagatgaattctcgagtcgttgggggcataatgactggagagaagaaagacggcttctcagatccaatcatctacactctggagaacattcagccaaagcagaagtttgagaggcccatctgtgtttcctggagcactgatgtgaagggtggaagatggacatcctttggctgtgtgatcctggaagcttctgagacatataccatctgcagctgtaatcagatggcaaatcttgccgttatcatggcgtctggggagctcacgatggacttttccttgtacatcattagccatgtaggcattatcatctccttggtgtgcctcgtcttggccatcgccacctttctgctgtgtcgctccatccgaaatcacaacacctacctccacctgcacctctgcgtgtgtctcctcttggcgaagactctcttcctcgccggtatacacaagactgacaacaagatgggctgcgccatcatcgcgggcttcctgcactaccttttccttgcctgcttcttctggatgctggtggaggctgtgatactgttcttgatggtcagaaacctgaaggtggtgaattacttcagctctcgcaacatcaagatgctgcacatctgtgcctttggttatgggctgccgatgctggtggtggtgatctctgccagtgtgcagccacagggctatggaatgcataatcgctgctggctgaatacagagacagggttcatctggagtttcttggggccagtttgcacagttatagtgatcaactcccttctcctgacctggaccttgtggatcctgaggcagaggctttccagtgttaatgccgaagtctcaacgctaaaagacaccaggttactgaccttcaaggcctttgcccagctcttcatcctgggctgctcctgggtgctgggcatttttcagattggacctgtggcaggtgtcatggcttacctgttcaccatcatcaacagcctgcagggggccttcatcttcctcatccactgtctgctcaacggccaggtacgagaagaatacaagaggtggatcactgggaagacgaagcccagctcccagtcccagacctcaaggatcttgctgtcctccatgccatccgcttccaagacgggttaa

SEQ ID NO: 4 - DNA, 444 bp, Homo sapiens
atgagccaaaccagggatttacagggaggaaaagctttcggactgctgaaggcccagcaggaagagaggctggatgagatcaacaagcaattcctagacgatcccaaatatagcagtgatgaggatctgccctccaaactggaaggcttcaaagagaaatacatggagtttgaccttaatggaaatggcgatattgatatcatgtccctgaaacgaatgctggagaaacttggagtccccaagactcacctagagctaaagaaattaattggagaggtgtccagtggctccggggagacgttcagctaccctgactttctcaggatgatgctgggcaagagatctgccatcctaaaaatgatcctgatgtatgaggaaaaagcgagagaaaaggaaaagccaacaggccccccagccaagaaagctatctctgagttgccctga

SEQ ID NO: 5 - DNA, 246 bp, Homo sapiens
atgggccagctttgctgctttcctttctcaagagatgaaggaaaaatcagtgaaaagaacggaggggagcccgatgacgctgaactagtaaggctcagtaagaggctggtggagaacgcggtgctcaaggctgtccagcagtatctggaggaaacacagaataaaaacaagccgggggaggggagctctgtgaaaaccgaagcagctgatcagaatggcaatgacaatgagaacaacaggaaatga

SEQ ID NO: 6 - DNA, 1443 bp, Homo sapiens
atgagcgacgtggctattgtgaaggagggttggctgcacaaacgaggggagtacatcaagacctggcggccacgctacttcctcctcaagaatgatggcaccttcattggctacaaggagcggccgcaggatgtggaccaacgtgaggctcccctcaacaacttctctgtggcgcagtgccagctgatgaagacggagcggccccggcccaacaccttcatcatccgctgcctgcagtggaccactgtcatcgaacgcaccttccatgtggagactcctgaggagcgggaggagtggacaaccgccatccagactgtggctgacggcctcaagaagcaggaggaggaggagatggacttccggtcgggctcacccagtgacaactcaggggctgaagagatggaggtgtccctggccaagcccaagcaccgcgtgaccatgaacgagtttgagtacctgaagctgctgggcaagggcactttcggcaaggtgatcctggtgaaggagaaggccacaggccgctactacgccatgaagatcctcaagaaggaagtcatcgtggccaaggacgaggtggcccacacactcaccgagaaccgcgtcctgcagaactccaggcaccccttcctcacagccctgaagtactctttccagacccacgaccgcctctgctttgtcatggagtacgccaacgggggcgagctgttcttccacctgtcccgggagcgtgtgttctccgaggaccgggcccgcttctatggcgctgagattgtgtcagccctggactacctgcactcggagaagaacgtggtgtaccgggacctcaagctggagaacctcatgctggacaaggacgggcacattaagatcacagacttcgggctgtgcaaggaggggatcaaggacggtgccaccatgaagaccttttgcggcacacctgagtacctggcccccgaggtgctggaggacaatgactacggccgtgcagtggactggtgggggctgggcgtggtcatgtacgagatgatgtgcggtcgcctgcccttctacaaccaggaccatgagaagctttttgagctcatcctcatggaggagatccgcttcccgcgcacgcttggtcccgaggccaagtccttgctttcagggctgctcaagaaggaccccaagcagaggcttggcgggggctccgaggacgccaaggagatcatgcagcatcgcttctttgccggtatcgtgtggcagcacgtgtacgagaagaagctcagcccacccttcaagccccaggtcacgtcggagactgacaccaggtattttgatgaggagttcacggcccagatgatcaccatcacaccacctgaccaagatgacagcatggagtgtgtggacagcgagcgcaggccccacttcccccagttctcctactcggccagcggcacggcctga

SEQ ID NO: 7 - DNA, 879 bp, Homo sapiens
atgaaccctttctggagcatgtctacaagctctgtacgcaaacgatctgaaggtgaagagaagacattaacaggggacgtgaaaaccagtcctccacgaactgcaccaaagaaacagctgccttctattcccaaaaatgctttgcccataactaagcctacatctcctgccccagcagcacagtcaacaaatggcacgcatgcgtcctatggacccttctacctggaatactctcttcttgcagaatttaccttggttgtgaagcagaagctaccaggcgtctatgtgcagccatcttatcgctctgcattaatgtggtttggagtaatattcatacggcatggactttaccaagatggcgtatttaagtttacagtttacatccctgataactatccagatggtgactgtccacgcttggtgttcgatattcctgtctttcacccgctagttgatcccacctcaggtgagctggatgtgaagagagcatttgcaaaatggaggcggaaccataatcatatttggcaggtattaatgtatgcaaggagagttttctacaagattgatacagcaagccccctgaacccagaggctgcagtactgtatgaaaaagatattcagctttttaaaagtaaagttgttgacagtgttaaggtgtgcactgctcgtttgtttgaccaacctaaaatagaagacccctatgcaattagcttttctccatggaatccttctgtacatgatgaagccagagaaaagatgctgactcagaaaaagcctgaagaacagcacaataaaagtgttcatgttgctggcctgtcatgggtaaagcctggctcagtacagcctttcagtaaagaagagaaaacagtggcgacttaa

SEQ ID NO: 8 - DNA, 1095 bp, Homo sapiens
atgccctaccaatatccagcactgaccccggagcagaagaaggagctgtctgacatcgctcaccgcatcgtggcacctggcaagggcatcctggctgcagatgagtccactgggagcattgccaagcggctgcagtccattggcaccgagaacaccgaggagaaccggcgcttctaccgccagctgctgctgacagctgacgaccgcgtgaacccctgcattgggggtgtcatcctcttccatgagacactctaccagaaggcggatgatgggcgtcccttcccccaagttatcaaatccaagggcggtgttgtgggcatcaaggtagacaagggcgtggtccccctggcagggacaaatggcgagactaccacccaagggttggatgggctgtctgagcgctgtgcccagtacaagaaggacggagctgacttcgccaagtggcgttgtgtgctgaagattggggaacacaccccctcagccctcgccatcatggaaaatgccaatgttctggcccgttatgccagtatctgccagcagaatggcattgtgcccatcgtggagcctgagatcctccctgatggggaccatgacttgaagcgctgccagtatgtgaccgagaaggtgctggctgctgtctacaaggctctgagtgaccaccacatctacctggaaggcaccttgctgaagcccaacatggtcaccccaggccatgcttgcactcagaagttttctcatgaggagattgccatggcgaccgtcacagcgctgcgccgcacagtgccccccgctgtcactgggatcaccttcctgtctggaggccagagtgaggaggaggcgtccatcaacctcaatgccattaacaagtgccccctgctgaagccctgggccctgaccttctcctacggccgagccctgcaggcctctgccctgaaggcctggggcgggaagaaggagaacctgaaggctgcgcaggaggagtatgtcaagcgagccctggccaacagccttgcctgtcaaggaaagtacactccgagcggtcaggctggggctgctgccagcgagtccctcttcgtctctaaccacgcctattaa

SEQ ID NO: 9 - DNA, 1005 bp, Homo sapiens
atggaagctgcacattttttcgaagggaccgagaagctgctggaggtttggttctcccggcagcagcccgacgcaaaccaaggatctggggatcttcgcactatcccaagatctgagtgggacatacttttgaaggatgtgcaatgttcaatcataagtgtgacaaaaactgacaagcaggaagcttatgtactcagtgagagtagcatgtttgtctccaagagacgtttcattttgaagacatgtggtaccaccctcttgctgaaagcactggttcccctgttgaagcttgctagggattacagtgggtttgactcaattcaaagcttcttttattctcgtaagaatttcatgaagccttctcaccaagggtacccacaccggaatttccaggaagaaatagagtttcttaatgcaattttcccaaatggagcagcatattgtatgggacgtatgaattctgactgttggtacttatatactctggatttcccagagagtcgggtaatcagtcagccagatcaaaccttggaaattctgatgagtgagcttgacccagcagttatggaccagttctacatgaaagatggtgttactgcaaaggatgtcactcgtgagagtggaattcgtgacctgataccaggttctgtcattgatgccacaatgttcaatccttgtgggtattcgatgaatggaatgaaatcggatggaacttattggactattcacatcactccagaaccagaattttcttatgttagctttgaaacaaacttaagtcagacctcctatgatgacctgatcaggaaagttgtagaagtcttcaagccaggaaaatttgtgaccaccttgtttgttaatcagagttctaaatgtcgcacagtgcttgcttcgccccagaagattgaaggttttaagcgtcttgattgccagagtgctatgttcaatgattacaattttgtttttaccagttttgctaagaagcagcaacaacagcagagttga

SEQ ID NO: 10 - DNA, 492 bp, Homo sapiens
atggacgccttagaaggagagagctttgcgctgtctttctcctccgcctctgatgcagaatttgatgctgtggttggatatttagaggacattatcatggatgacgagttccagttattacagagaaatttcatggacaagtactacctggagtttgaagacacagaagagaataaactcatctacacacctatttttaatgaatacatttctttggtagaaaaatacattgaagaacagctgctgcagcggattcctgagttcaacatggcagccttcaccacaacattacagcaccataaggatgaagtggctggtgacatattcgacatgctgctcaccttcacagattttctggcttttaaagaaatgtttttggactacagagcagaaaaagaaggccgaggactggacttaagcagtggcttagtggtgacttcattgtgcaaatcatcttctctgccagcttcccagaacaatctgcggcactag

SEQ ID NO: 11 - DNA, 2520 bp, Homo sapiens
atggcgcagtttgacactgaataccagcgcctagaggcctcctatagtgattcacccccaggggaggaggacctgttggtgcacgtcgccgaggggagcaagtcaccttggcaccatattgaaaaccttgacctcttcttctctcgagtttataatctgcaccagaagaatggcttcacatgtatgctcatcggggagatctttgagctcatgcagttcctctttgtggttgccttcactaccttcctggtcagctgcgtggactatgacatcctatttgccaacaagatggtgaaccacagtcttcaccctactgaacccgtcaaggtcactctgccagacgcctttttgcctgctcaagtctgtagtgccaggattcaggaaaatggctcccttatcaccatcctggtcattgctggtgtcttctggatccaccggcttatcaagttcatctataacatttgctgctactgggagatccactccttctacctgcacgctctgcgcatccctatgtctgcccttccgtattgcacgtggcaagaagtgcaggcccggatcgtgcagacgcagaaggagcaccagatctgcatccacaaacgtgagctgacagaactggacatctaccaccgcatcctccgtttccagaactacatggtggcactggttaacaaatccctcctgcctctgcgcttccgcctgcctggcctcggggaagctgtcttcttcacccgtggtctcaagtacaactttgagctgatcctcttctggggacctggctctctgtttctcaatgaatggagcctcaaggccgagtacaaacgtggggggcaacggctagagctggcccagcgcctcagcaaccgcatcctgtggattggcatcgctaacttcctgctgtgccccctcatcctcatatggcaaatcctctatgccttcttcagctatgctgaggtgctgaagcgggagccgggggccctgggagcacgctgctggtcactctatggccgctgctacctccgccacttcaacgagctggagcacgagctgcagtcccgcctcaaccgtggctacaagcccgcctccaagtacatgaattgcttcttgtcacctcttttgacactgctggccaagaatggagccttcttcgctggctccatcctggctgtgcttattgccctcaccatttatgacgaagatgtgttggctgtggaacatgtgctgaccaccgtcacactcctgggggtcaccgtgaccgtgtgcaggtcctttatcccggaccagcacatggtgttctgccctgagcagctgctccgcgtgatcctcgctcacatccactacatgcctgaccactggcagggtaatgcccaccgctcgcagacccgggacgagtttgcccagctcttccagtacaaggcagtgttcattttggaagagttgctgagccccattgtcacacccctcatcctcatcttctgcctgcgcccacgggccctggagattatagacttcttccgaaacttcaccgtggaggtcgttggtgtgggagatacctgctcctttgctcagatggatgttcgccagcatggtcatccccagtggctatctgctgggcagacagaggcctcagtgtaccagcaagctgaggatggaaagacagagttgtcactcatgcactttgccatcaccaaccctggctggcagccaccacgtgagagcacagccttcctaggcttcctcaaggagcaggttcagcgggatggagcagctgctagcctcgcccaagggggtctgctccctgaaaatgccctctttacgtctatccagtccttacaatctgagtctgagcccctgagccttatcgcaaatgtggtagctggctcatcctgccggggccctccactgcccagagacctgcagggctccaggcacagggctgaagtcgcctctgccctgcgctccttctccccgctgcaacccgggcaggcgcccacaggccgggctcacagcaccatgacaggctctggggtggatgccaggacagccagctccgggagcagcgtgtgggaaggacagctgcagagcctggtgctgtcagaatatgcatccacagagatgagcctgcatgccctctatatgcaccagctccacaagcagcaggcccaggctgaacctgagcggcatgtatggcaccgccgggagagtgatgagagtggagaaagcgcccctgatgaagggggagagggcgcccgggccccccagtctatccctcgctctgctagctatccctgtgcagcaccccggcctggagctcctgagaccactgccctgcatgggggcttccagaggcgctacggtggcatcacagatcctggcacagtgcccagggttccctctcatttctctcggctgcctcttggagggtgggcagaagatgggcagtcggcatcaaggcaccctgagcccgtgcccgaagagggctcggaggatgagctaccccctcaggtgcacaaggtatag

SEQ ID NO: 12 - DNA, 3681 bp, Homo sapiens
atggacagggaagaaaggaagaccatcaatcagggtcaagaagatgaaatggagatttatggttacaatttgagtcgctggaagcttgccatagtttctttaggagtgatttgctctggtgggtttctcctcctcctcctctattggatgcctgagtggcgggtgaaagcgacctgtgtcagagctgcaattaaagactgtgaagtagtgctgctgaggactactgatgaattcaaaatgtggttttgtgcaaaaattcgcgttctttctttggaaacttacccagtttcaagtccaaaatctatgtctaataagctttcaaatggccatgcagtttgtttaattgagaatcccactgaagaaaataggcacaggatcagtaaatattcacagactgaatcacaacagattcgttatttcacccaccatagtgtaaaatatttctggaatgataccattcacaattttgatttcttaaagggactggatgaaggtgtttcttgtacgtcaatttatgaaaagcatagtgcaggactgacaaaggggatgcatgcctacagaaaactgctttatggagtaaatgaaattgctgtaaaagtgccttctgtttttaagcttctaattaaagaggttctcaacccattttacattttccagctgttcagtgttatactgtggagcactgatgaatactattactatgctctagctattgtggttatgtccatagtatcaatcgtaagctcactatattccattagaaagcaatatgttatgttgcatgacatggtggcaactcatagtaccgtaagagtttcagtttgtagagtaaatgaagaaatagaagaaatcttttctaccgaccttgtgccaggagatgtcatggtcattccattaaatgggacaataatgccttgtgatgctgtgcttattaatggtacctgcattgtaaacgaaagcatgttaacaggagaaagtgttccagtgacaaagactaatttgccaaatccttcagtggatgtgaaaggaataggagatgaattatataatccagaaacacataaacgacatactttgttttgtgggacaactgttattcagactcgtttctacactggagaactcgtcaaagccatagttgttagaacaggatttagtacttccaaaggacagcttgttcgttccatattgtatcccaaaccaactgattttaaactctacagagatgcctacttgtttctactatgtcttgtggcagttgctggcattgggtttatctacactattattaatagcattttaaatgaggtacaagttggggtcataattatcgagtctcttgatattatcacaattactgtgccccctgcacttcctgctgcaatgactgctggtattgtgtatgctcagagaagactgaaaaaaatcggtattttctgtatcagtcctcaaagaataaatatttgtggacagctcaatcttgtttgctttgacaagactggaactctaactgaagatggtttagatctttgggggattcaacgagtggaaaatgcacgatttctttcaccagaagaaaatgtgtgcaatgagatgttggtaaaatcccagtttgttgcttgtatggctacttgtcattcacttacaaaaattgaaggagtgctctctggtgatccacttgatctgaaaatgtttgaggctattggatggattctggaagaagcaactgaagaagaaacagcacttcataatcgaattatgcccacagtggttcgtcctcccaaacaactgcttcctgaatctacccctgcaggaaaccaagaaatggagctgtttgaacttccagctacttatgagataggaattgttcgccagttcccattttcttctgctttgcaacgtatgagtgtggttgccagggtgctgggggataggaaaatggacgcctacatgaaaggagcgcccgaggccattgccggtctctgtaaacctgaaacagttcctgtcgattttcaaaacgttttggaagacttcactaaacagggcttccgtgtgattgctcttgcacacagaaaattggagtcaaaactgacatggcataaagtacagaatattagcagagatgcaattgagaacaacatggattttatgggattaattataatgcagaacaaattaaagcaagaaacccctgcagtacttgaagatttgcataaagccaacattcgcaccgtcatggtcacaggtgacagtatgttgactgctgtctctgtggccagagattgtggaatgattctacctcaggataaagtgattattgctgaagcattacctccaaaggatgggaaagttgccaaaataaattggcattatgcagactccctcacgcagtgcagtcatccatcagcaattgacccagaggctattccggttaaattggtccatgatagcttagaggatcttcaaatgactcgttatcattttgcaatgaatggaaaatcattctcagtgatactggagcattttcaagaccttgttcctaagttgatgttgcatggcaccgtgtttgcccgtatggcacctgatcagaagacacagttgatagaagcattgcaaaatgttgattattttgttgggatgtgtggtgatggcgcaaatgattgtggtgctttgaagagggcacacggaggcatttccttatcggagctcgaagcttcagtggcatctccctttacctctaagactcctagtatttcctgtgtgccaaaccttatcagggaaggccgtgctgctttaataacttccttctgtgtgtttaaattcatggcattgtacagcattatccagtacttcagtgttactctgctgtattctatcttaagtaacctaggagacttccagtttctcttcattgatctggcaatcattttggtagtggtatttacaatgagtttaaatcctgcctggaaagaacttgtggcacaaagaccaccttcgggtcttatatctggggcccttctcttctccgttttgtctcagattatcatctgcattggatttcaatctttgggttttttttgggtcaaacagcaaccttggtatgaagtgtggcatccaaaatcagatgcttgtaatacaacaggaagcgggttttggaattcttcacacgtagacaatgaaaccgaacttgatgaacataatatacaaaattatgaaaataccacagtgttttttatttccagttttcagtacctcatagtggcaattgccttttcaaaaggaaaacccttcaggcaaccttgctacaaaaattatttttttgttttttctgtgatttttttatatatttttatattattcatcatgttgtatccagttgcctctgttgaccaggttcttcagatagtgtgtgtaccatatcagtggcgtgtaactatgctcatcattgttcttgtcaatgcctttgtgtctatcacagtggaggagtcagtggatcggtggggaaaatgctgcttaccctgggccctgggctgtagaaagaagacaccaaaggcaaagtacatgtatctggcgcaggagctcttggttgatccagaatggccaccaaaacctcagacaaccacagaagctaaagctttagttaaggagaatggatcatgtcaaatcatcaccataacatag

SEQ ID NO: 13 - DNA, 2496 bp, Homo sapiens
atgggggagcttttccggagtgaagaaatgacactggcccagctttttctacagtcagaggctgcttattgttgtgtcagtgaattaggagaacttggaaaggttcagtttcgtgacttaaatccagatgtgaatgttttccaacggaaatttgtgaatgaagttagaagatgtgaagaaatggatcgaaagcttcgatttgttgagaaagagataagaaaagctaacattccgattatggacaccggtgaaaacccagaggttcccttcccccgggacatgattgacttagaggccaattttgagaagattgaaaatgaactgaaggaaatcaacacaaaccaggaagctctgaagagaaacttcctggaactgaccgaattaaaatttatacttcgcaaaactcagcaattttttgatgagatggcggatccagacttgttggaagagtcctcatccctcttggagccaagtgagatgggaagaggcactcctttaagacttggcttcgtggctggtgtcattaaccgggagcgcatccctacttttgagcgcatgctttggcgggtatgccggggaaatgtgttcctgcgacaggctgaaatcgagaaccccctggaggatcctgtgactggcgactacgtgcacaagtctgtgtttatcattttcttccaaggcgatcagctgaaaaacagagtcaagaaaatctgtgaagggttccgagcctcactctatccctgtcctgagacaccacaggagaggaaggaaatggcttctggagtgaataccaggattgatgatctccaaatggttctgaatcaaacggaggatcaccgccagagggttctgcaggcagctgctaagaacatccgtgtctggttcatcaaagtgcggaagatgaaggccatctatcacaccctgaacctgtgcaacatagatgtgactcagaaatgcttgattgcagaggtctggtgccctgtcaccgaccttgactccatccagtttgcactcagaaggggcacggaacacagtggttccactgtaccttccattttgaacaggatgcagacaaaccagactcccccaacctataacaaaaccaacaagtttacctatggctttcagaacatagtagatgcttatggaattggaacttaccgagagataaatccagctccgtatactattatcacgttcccttttctatttgctgtgatgtttggagacttcggtcatggcattttaatgaccctttttgctgtgtggatggtactgagggagagccggatcctttcccagaagaatgagaatgagatgtttagcactgtgttcagtggtcgatacattattttattgatgggtgtgttctccatgtacactggcctcatctacaatgattgcttttccaagtctcttaatatctttgggtcatcctggagtgtacggccgatgtttacttataattggactgaagagacgcttcgggggaaccctgttctacagctgaacccagccctccctggagtgtttggtggaccatacccttttggcattgatccaatttggaacattgctaccaataaactgacgttcttgaactcctttaagatgaagatgtctgttatccttggtatcatccatatgctgtttggagtcagcctgagtctgttcaaccatatctatttcaagaagcccctgaatatctactttggatttattcctgaaataatcttcatgacctctttgtttggctatttggttatccttattttttacaagtggacggcctatgatgctcatacctctgagaatgcaccaagccttctgatccatttcataaacatgttcctcttttcctacccagagtctggttattcaatgttgtattctggacagaaaggaattcagtgtttcctggtagtggttgcactactgtgtgtaccttggatgctgctgtttaaaccattggtccttcgccgtcagtatttgaggagaaagcatttgggaactctcaactttggtgggatcagggtgggcaacggaccgacagaggaggatgctgagattattcagcatgaccagctctccacccactcagaggacgcagacgagtttgactttggggacaccatggtccaccaggccatccacaccatcgagtactgcctgggctgcatctccaacactgcctcctacttgcggctctgggccctcagcctcgctcatgcgcagctgtctgaggtgctttggaccatggtgatccacatcggcctgagcgtgaagagcttggcgggaggtttggtgctgttcttcttcttcactgcctttgccaccctgaccgtggccatcctcctgatcatggagggcctctcggcctttctccacgcactgcgcttacactgggttgagttccagaataaattctacagcgggaccggtttcaagttcttacccttctccttcgagcatattcgggaagggaagtttgaagagtga

SEQ ID NO: 14 - DNA, 3579 bp, Homo sapiens
atgttctgcagtgaaaagaaattgcgtgaagtggaacggatagtgaaagccaatgaccgtgaatataatgaaaagttccagtatgcggataatcgtatccacacatcgaaatataatattctcaccttcttgccaattaatttatttgaacagttccaaagagtggcaaatgcctattttctttgccttctgattttacagctaattccagaaatttcctccttgacctggtttaccaccattgtgcctttggtcctggtgataactatgacagctgtcaaagatgccacagatgactattttcgccacaagagtgataatcaagtgaataatcggcagtctgaagtgctcatcaacagcaaactgcagaatgaaaaatggatgaatgtcaaagtgggagacatcattaaattagaaaataaccaatttgttgctgctgatttacttctcctatcaagtagtgagccacatggtctctgttatgttgaaactgctgagcttgatggggaaacgaacctaaaagtccgccatgcactatcagttacttcagaacttggagcagatatcagcagacttgcagggtttgatgggattgttgtctgtgaggtgcctaacaacaagttagataaattcatgggaatcctttcttggaaagacagcaagcattccctcaacaatgagaagataatcctgagaggctgcatcctgagaaataccagctggtgttttggaatggttatttttgcaggtcctgacactaaactaatgcagaatagtggtaagacaaagtttaaaaggacaagcattgatagattgatgaatactctagtactatggatttttgggtttctgatatgcttgggaattattcttgcaataggaaattcaatctgggagagtcaaactggggaccaattcagaactttcctcttttggaatgaaggagagaagagctctgtgttctccggattcttaacattctggtcatatattattattctcaatacagttgtacccatttccttatatgtgagtgtggaagtaattcgtctaggacacagttattttataaactgggaccggaagatgtattattctcgaaaagcaatacctgcagtggctcgaacgaccacgctcaatgaggaactggggcagattgagtacattttctccgacaaaacgggtaccctcactcaaaacatcatgacctttaaaagatgttccattaatgggagaatctatggtgaagtacatgatgacctggatcagaagacagaaataactcaggaaaaagagcctgtggatttctcagtcaaatctcaagcggatagagaatttcagttctttgaccaccatctgatggaatccattaaaatgggtgatcccaaagttcatgaattccttaggttacttgctctctgccacactgtaatgtcagaagagaatagcgcaggagagctgatttaccaagttcagtcacctgatgaaggggctctagtgactgccgctagaaattttgggttcatttttaaatcccggaccccagagaccataacaatagaagaattgggaacactagttacttatcaattacttgcctttttggatttcaacaacaccagaaaaaggatgtctgtcatagttcgaaacccagaaggacagataaagctttattccaaaggagcagatactattctgtttgaaaaacttcatccttccaatgaagtccttttgtctttgacgtcagaccacctcagtgaatttgcaggggaaggccttcggaccttggccatcgcatacagagacctggatgacaagtactttaaagagtggcataagatgcttgaagatgcgaatgctgccacagaagagagggatgaacgaatagctgggctatatgaagaaattgaaagagatttgatgctactaggtgccactgctgtagaagataagttacaggagggtgttattgaaacagttacaagtttatcactagccaatattaagatctgggtcctaacaggagacaaacaagaaactgccatcaacatcggttatgcctgcaacatgctgactgacgacatgaatgatgtgtttgtgatagcagggaataatgctgtggaagtgagagaagaactcaggaaagcaaaacaaaatttgtttggacaaaacagaaatttttccaatggccatgtagtttgtgaaaaaaagcagcagctggagttggattctattgtagaagaaaccataacaggagattatgccttaatcataaatggccacagtttggctcatgccctagaaagtgatgtcaagaatgatctcctagaacttgcttgcatgtgtaagactgtaatttgctgcagggtcactccactccagaaagcccaagtggtagagctggtgaagaagtacagaaatgctgttactttggccattggtgatggagccaatgatgtcagcatgattaaaagtgctcacattggtgttggcatcagcggccaggaaggattgcaagcagtcttagccagcgactattcatttgcacagtttagatatctccaaaggcttctccttgttcatggaaggtggtcttatttccgaatgtgcaaattcttatgctatttcttctataagaattttgcatttacacttgtgcatttctggtttggtttcttctgtggtttctcagcccagactgtttatgaccagtggttcatcaccctttttaacattgtttacacatcactgcctgttttagccatggggatttttgaccaggatgtgagtgaccagaacagcgtggactgtccccagctctacaaaccaggacagctgaatctgctttttaacaagcgtaaatttttcatttgcgtgttgcatggaatctacacctcattagtccttttcttcatcccctatggggccttttacaacgtggctggagaagatgggcaacatattgctgactaccagtcctttgcagttaccatggccacatctttggtcattgtggtcagtgtgcagatagccttggataccagttactggactttcattaatcacgtcttcatctgggggagcattgccatttatttctccattttatttacaatgcacagtaatggcatctttggcatcttcccaaaccagtttccatttgttggtaatgcacgacattccctgacccagaagtgcatctggcttgtaattctcttaacaacagtggcttcagttatgccagtggtggcattcagatttttgaaggtggatttatacccaaccctgagtgatcagatccgccggtggcagaaggctcaaaagaaggcaaggcctccaagtagccgaaggcctcggacccgcaggtcaagctcaagaaggtctggatatgcttttgctcaccaagaaggctatggagagcttatcacatctggaaaaaatatgcgagctaaaaatccacccccaacatcagggctggaaaagacacattataatagcactagctggattgaaaatttatgtaagaaaaccacagacaccgtgagcagctttagccaggataaaacagtgaaactgtga

SEQ ID NO: 15 - DNA, 1956 bp, Homo sapiens
atgggcaagaagcacaagaagcacaagtcggacaaacacctctacgaggagtatgtagagaagcccttgaagctggtcctcaaagtaggagggaacgaagtcaccgaactctccacgggcagctcggggcacgactccagcctcttcgaagacaaaaacgatcatgacaaacacaaggacagaaagcggaaaaagagaaagaaaggagagaagcagattccaggggaagaaaaggggagaaaacggagaagagttaaggaggataaaaagaagcgagatcgagaccgggtggagaatgaggcagaaaaagatctccagtgtcacgcccctgtgagattagacttgcctcctgagaagcctctcacaagctctttagccaaacaagaagaagtagaacagacaccccttcaagaagctttgaatcaactgatgagacaattgcagagaaaagatccaagtgctttcttttcatttcctgtgactgattttattgctcctggctactccatgatcattaaacacccaatggattttagtaccatgaaagaaaagatcaagaacaatgactatcagtccatagaagaactaaaggataacttcaaactaatgtgtactaatgccatgatttacaataaaccagagaccatttattataaagctgcaaagaagctgttgcactcaggaatgaaaattcttagccaggaaagaattcagagcctgaagcagagcatagacttcatggctgacttgcagaaaactcgaaagcagaaagatggaacagacacctcacagagtggggaggacggaggctgctggcagagagagagagaggactctggagatgccgaagcacacgccttcaagagtcccagcaaagaaaataaaaagaaagacaaagatatgcttgaagataagtttaaaagcaataatttagagagagagcaggagcagcttgaccgcatcgtgaaggaatctggaggaaagctgaccaggcggcttgtgaacagtcagtgcgaatttgaaagaagaaaaccagatggaacaacgacgttgggacttctccatcctgtggatcccattgtaggagagccaggctactgccctgtgagactgggaatgacaactggaagacttcagtctggagtgaatactttgcaggggttcaaagaggataaaaggaacaaagtcactccagtgttatatttgaattatgggccctacagttcttatgcaccgcattatgactccacatttgcaaatatcagcaaggatgattctgatttaatctattcaacctatggggaagactctgatcttccaagtgatttcagcatccatgagtttttggccacgtgccaagattatccgtatgtcatggcagatagtttactggatgttttaacaaaaggagggcattccaggaccctacaagagatggagatgtcattgcctgaagatgaaggccatactaggacacttgacacagcaaaagaaatggagattacagaagtagagccaccagggcgtttggactccagtactcaagacaggctcatagcgctgaaagcagtaacaaattttggcgttccagttgaagtttttgactctgaagaagctgaaatattccagaagaaacttgatgagaccaccagattgctcagggaactccaggaagcccagaatgaacgtttgagcaccagaccccctccgaacatgatctgtctcttgggtccctcatacagagaaatgcatcttgctgaacaagtgaccaataatcttaaagaacttgcacagcaagtaactccaggtgatatcgtaagcacgtatggagttcgaaaagcaatggggatttccattccttcccccgtcatggaaaacaactttgtggatttgacagaagacactgaagaacctaaaaagacggatgttgctgagtgtggacctggtggaagttga

SEQ ID NO: 16 - DNA, 477 bp, Homo sapiens
atgagccacgggaagggaaccgacatgctcccggagatcgccgccgccgtgggcttcctctccagcctcctgaggacccggggctgcgtgagcgagcagaggcttaaggtcttcagcggggcgctccaggaggcactcacagagcactacaaacaccactggtttcccgaaaagccgtccaagggctccggctaccgctgcattcgcatcaaccacaagatggaccccatcatcagcagggtggccagccagatcggactcagccagccccagctgcaccagctgctgcccagcgagctgaccctgtgggtggacccctatgaggtgtcctaccgcattggggaggacggctccatctgcgtcttgtacgaggaggccccactggccgcctcctgtgggctcctcacctgcaagaaccaagtgctgctgggccggagcagcccctccaagaactacgtgatggcagtctccagctag

SEQ ID NO: 17 - DNA, 873 bp, Homo sapiens
atggttctgctgcacgtgaagcggggcgacgagagccagttcctgctgcaggcgcctgggagtaccgagctggaggagctcacggtgcaggtggcccgggtctataatgggcggctcaaggtgcagcgcctctgctcagaaatggaagaattagccgaacatggcatatttctccctcctaatatgcaaggactgaccgatgatcagattgaagaattgaaattgaaggatgaatggggtgaaaaatgcgtacccagcggaggtgcagtgtttaaaaaggatgatattggacgaaggaatgggcaagctccaaatgagaagatgaagcaagtgttaaagaagactatagaagaagccaaagcaataatatctaagaaacaagtggaagccggtgtctgtgttaccatggagatggtgaaagatgccttggaccagcttcgaggcgcggtgatgattgtttaccccatggggttgccaccgtatgatcccatccgcatggagtttgaaaataaggaagacttgtcgggaacacaggcagggctcaacgtcattaaagaggcagaggcgcagctgtggtgggcagccaaggagctgagaagaacgaagaagctttcagactacgtggggaagaatgaaaaaaccaaaattatcgccaagattcagcaaaggggacagggagctccagcccgagagcctattattagcagtgaggagcagaagcagctgatgctgtactatcacagaagacaagaggagctcaagagattggaagaaaatgatgatgatgcctatttaaactcaccatgggcggataacactgctttgaaaagacattttcatggagtgaaagacataaagtggagaccaagatga

SEQ ID NO: 18 - DNA, 228 bp, Homo sapiens
atggagagaagctttgtatggctgtcatgcttagacagtgattcctgcaacttgaccttcaggctgggagaggtggagagccatgcctgttctccttccttgctatggaatttgctgacacaatatcttccgcctggtgctgggcatatcctaagaacttacaactttcctgtattatcctgtgtgagcagctgtcaccttattgggggaaaaatgcctgaaaattag

SEQ ID NO: 19 - DNA, 870 bp, Homo sapiens
atggagctgctgtgccacgaggtggacccggtccgcagggccgtgcgggaccgcaacctgctccgagacgaccgcgtcctgcagaacctgctcaccatcgaggagcgctaccttccgcagtgctcctacttcaagtgcgtgcagaaggacatccaaccctacatgcgcagaatggtggccacctggatgctggaggtctgtgaggaacagaagtgcgaagaagaggtcttccctctggccatgaattacctggaccgtttcttggctggggtcccgactccgaagtcccatctgcaactcctgggtgctgtctgcatgttcctggcctccaaactcaaagagaccagcccgctgaccgcggagaagctgtgcatttacaccgacaactccatcaagcctcaggagctgctggagtgggaactggtggtgctggggaagttgaagtggaacctggcagctgtcactcctcatgacttcattgagcacatcttgcgcaagctgccccagcagcgggagaagctgtctctgatccgcaagcatgctcagaccttcattgctctgtgtgccaccgactttaagtttgccatgtacccaccgtcgatgatcgcaactggaagtgtgggagcagccatctgtgggctccagcaggatgaggaagtgagctcgctcacttgtgatgccctgactgagctgctggctaagatcaccaacacagacgtggattgtctcaaagcttgccaggagcagattgaggcggtgctcctcaatagcctgcagcagtaccgtcaggaccaacgtgacggatccaagtcggaggatgaactggaccaagccagcacccctacagacgtgcgggatatcgacctgtga

SEQ ID NO: 20 - DNA, 2229 bp, Homo sapiens
atggacaagttttggtggcacgcagcctggggactctgcctcgtgccgctgagcctggcgcagatcgatttgaatataacctgccgctttgcaggtgtattccacgtggagaaaaatggtcgctacagcatctctcggacggaggccgctgacctctgcaaggctttcaatagcaccttgcccacaatggcccagatggagaaagctctgagcatcggatttgagacctgcaggtatgggttcatagaagggcacgtggtgattccccggatccaccccaactccatctgtgcagcaaacaacacaggggtgtacatcctcacatccaacacctcccagtatgacacatattgcttcaatgcttcagctccacctgaagaagattgtacatcagtcacagacctgcccaatgcctttgatggaccaattaccataactattgttaaccgtgatggcacccgctatgtccagaaaggagaatacagaacgaatcctgaagacatctaccccagcaaccctactgatgatgacgtgagcagcggctcctccagtgaaaggagcagcacttcaggaggttacatcttttacaccttttctactgtacaccccatcccagacgaagacagtccctggatcaccgacagcacagacagaatccctgctaccactttgatgagcactagtgctacagcaactgagacagcaaccaagaggcaagaaacctgggattggttttcatggttgtttctaccatcagagtcaaagaatcatcttcacacaacaacacaaatggctggtacgtcttcaaataccatctcagcaggctgggagccaaatgaagaaaatgaagatgaaagagacagacacctcagtttttctggatcaggcattgatgatgatgaagattttatctccagcaccatttcaaccacaccacgggcttttgaccacacaaaacagaaccaggactggacccagtggaacccaagccattcaaatccggaagtgctacttcagacaaccacaaggatgactgatgtagacagaaatggcaccactgcttatgaaggaaactggaacccagaagcacaccctcccctcattcaccatgagcatcatgaggaagaagagaccccacattctacaagcacaatccaggcaactcctagtagtacaacggaagaaacagctacccagaaggaacagtggtttggcaacagatggcatgagggatatcgccaaacacccaaagaagactcccattcgacaacagggacagctgcagcctcagctcataccagccatccaatgcaaggaaggacaacaccaagcccagaggacagttcctggactgatttcttcaacccaatctcacaccccatgggacgaggtcatcaagcaggaagaaggatggatatggactccagtcatagtataacgcttcagcctactgcaaatccaaacacaggtttggtggaagatttggacaggacaggacctctttcaatgacaacgcagcagagtaattctcagagcttctctacatcacatgaaggcttggaagaagataaagaccatccaacaacttctactctgacatcaagcaataggaatgatgtcacaggtggaagaagagacccaaatcattctgaaggctcaactactttactggaaggttatacctctcattacccacacacgaaggaaagcaggaccttcatcccagtgacctcagctaagactgggtcctttggagttactgcagttactgttggagattccaactctaatgtcaatcgttccttatcaggagaccaagacacattccaccccagtggggggtcccataccactcatggatctgaatcagatggacactcacatgggagtcaagaaggtggagcaaacacaacctctggtcctataaggacaccccaaattccagaatggctgatcatcttggcatccctcttggccttggctttgattcttgcagtttgcattgcagtcaacagtcgaagaaggtgtgggcagaagaaaaagctagtgatcaacagtggcaatggagctgtggaggacagaaagccaagtggactcaacggagaggccagcaagtctcaggaaatggtgcatttggtgaacaaggagtcgtcagaaactccagaccagtttatgacagctgatgagacaaggaacctgcagaatgtggacatgaagattggggtgtaa

SEQ ID NO: 21 - DNA, 387 bp, Homo sapiens
atgggaatccaaggagggtctgtcctgttcgggctgctgctcgtcctggctgtcttctgccattcaggtcatagcctgcagtgctacaactgtcctaacccaactgctgactgcaaaacagccgtcaattgttcatctgattttgatgcgtgtctcattaccaaagctgggttacaagtgtataacaagtgttggaagtttgagcattgcaatttcaacgacgtcacaacccgcttgagggaaaatgagctaacgtactactgctgcaagaaggacctgtgtaactttaacgaacagcttgaaaatggtgggacatccttatcagagaaaacagttcttctgctggtgactccatttctggcagcagcctggagccttcatccctaa

SEQ ID NO: 22 - DNA, 1785 bp, Homo sapiens
atggcagcggagtcaggggaactaatcggggcttgtgagttcatgaaagatcggttatattttgctactttaaggaatagaccaaaaagcacagtaaatacccactatttctccatcgatgaggagctggtctatgaaaatttctatgcagattttggaccgctgaacttggcaatggtgtacagatattgctgcaaactaaacaagaaactaaaatcatacagtttgtcaagaaagaaaatagtgcactacacctgttttgaccaacggaaaagagcaaatgcagcatttttgataggtgcctatgcagtaatctatttaaagaagacaccagaagaagcctacagagcactcctgtctggctcaaaccccccctatcttccattcagggatgcttcctttggaaattgcacttacaatctcaccattctcgactgtttgcagggaatcagaaagggattacaacatggattttttgactttgagacatttgatgtggatgaatatgaacattatgagcgagttgaaaatggtgacttcaactggattgttccaggaaaatttttagcatttagtggaccacatcctaaaagcaaaattgagaatggttatcctcttcacgcccctgaagcctactttccttatttcaaaaagcataatgtgactgcagttgtgaggctaaacaaaaagatttatgaggcaaagcgcttcacagacgctggcttcgagcactatgacctcttcttcatagatggcagcacacccagtgacaacatcgtgcgaaggttcctgaacatctgtgagaacaccgaaggggccatcgccgttcactgcaaagctggtcttggaagaacagggacattgatagcctgttatgtaatgaaacactacaggtttacacatgctgaaataattgcttggattagaatatgccggccaggctctattataggaccccagcagcacttcctggaagaaaaacaagcatcgttgtgggtccaaggagacattttccgatccaaactgaaaaatcgaccatccagtgaaggaagtattaataaaattctttctggcctagatgatatgtctattggtggaaatctttcaaaaacacaaaacatggaacgatttggagaggataacttagaagatgatgatgtggaaatgaaaaatggtataacccagggagacaaactacgtgccttaaaaagtcagagacagccacgtacctcaccatcctgtgcatttaggtcagatgatacaaaaggacatccaagagcagtgtcccagcctttcagattaagttcatccctgcaaggatctgcagttactttgaagacatcaaaaatggcactgtccccttcagcaacggccaagaggatcaacagaacttctttgtcttcgggtgccactgtaagaagcttttccataaactcccggctagccagttctctagggaacttgaatgctgcaacagatgatccagagaacaaaaagacctcctcatcctctaaggcaggcttcacagccagcccgtttaccaacctcttgaatggcagctcccagccaactaccagaaattaccctgagctcaacaataatcagtacaacagaagcagcaacagcaacgggggcaacctgaacagccccccaggcccccacagcgccaagacagaggagcacaccaccatcctccgaccctcctacaccgggctttcttcttcttcagcgagattcctgagccgttctatcccttcccttcagtctgaatatgttcattactaa

SEQ ID NO: 23 - DNA, 1614 bp, Homo sapiens
atgggggcgacgggggcggcggagccgctgcaatccgtgctgtgggtgaagcagcagcgctgcgccgtgagcctggagcccgcgcgggctctgctgcgctggtggcggagcccggggcccggagccggcgcccccggcgcggatgcctgctctgtgcctgtatctgagatcatcgccgttgaggaaacagacgttcacgggaaacatcaaggcagtggaaaatggcagaaaatggaaaagccttacgcttttacagttcactgtgtaaagagagcacgacggcaccgctggaagtgggcgcaggtgactttctggtgtccagaggagcagctgtgtcacttgtggctgcagaccctgcgggagatgctggagaagctgacgtccagaccaaagcatttactggtatttatcaacccgtttggaggaaaaggacaaggcaagcggatatatgaaagaaaagtggcaccactgttcaccttagcctccatcaccactgacatcatcgttactgaacatgctaatcaggccaaggagactctgtatgagattaacatagacaaatacgacggcatcgtctgtgtcggcggagatggtatgttcagcgaggtgctgcacggtctgattgggaggacgcagaggagcgccggggtcgaccagaaccacccccgggctgtgctggtccccagtagcctccggattggaatcattcccgcagggtcaacggactgcgtgtgttactccaccgtgggcaccagcgacgcagaaacctcggcgctgcatatcgttgttggggactcgctggccatggatgtgtcctcagtccaccacaacagcacactccttcgctactccgtgtccctgctgggctacggcttctacggggacatcatcaaggacagtgagaagaaacggtggttgggtcttgccagatacgacttttcaggtttaaagaccttcctctcccaccactgctatgaagggacagtgtccttcctccctgcacaacacacggtgggatctccaagggataggaagccctgccgggcaggatgctttgtttgcaggcaaagcaagcagcagctggaggaggagcagaagaaagcactgtatggtttggaagctgcggaggacgtggaggagtggcaagtcgtctgtgggaagtttctggccatcaatgccacaaacatgtcctgtgcttgtcgccggagccccaggggcctctccccggctgcccacttgggagacgggtcttctgacctcatcctcatccggaaatgctccaggttcaattttctgagatttctcatcaggcacaccaaccagcaggaccagtttgacttcacttttgttgaagtttatcgcgtcaagaaattccagtttacgtcgaagcacatggaggatgaggacagcgacctcaaggagggggggaagaagcgctttgggcacatttgcagcagccacccctcctgctgctgcaccgtctccaacagctcctggaactgcgacggggaggtcctgcacagccctgccatcgaggtcagagtccactgccagctggttcgactctttgcacgaggaattgaagagaatccgaagccagactcacacagctga

SEQ ID NO: 24 - DNA, 1221 bp, Homo sapiens
atggcggcaggcgccggggccgggtccgcgccgcgctggctgagggcgctgagcgagccgctgagcgcggcgcagctgcggcgactggaggagcaccgctacagcgcggcgggcgtctcgctgctcgagccgccgctgcagctctactggacctggctgctccagtggatcccgctctggatggcccccaactccatcaccctgctggggctcgccgtcaacgtggtcaccacgctcgtgctcatctcctactgtcccacggccaccgaagaggcaccatactggacataccttttatgtgcactgggactttttatttaccagtcactggatgctattgatgggaaacaagccagaagaacaaactcttgttcccctttaggggagctctttgaccatggctgtgactctctttccacagtatttatggcagtgggagcttcaattgccgctcgcttaggaacttatcctgactggttttttttctgctcttttattgggatgtttgtgttttattgcgctcattggcagacttatgtttcaggcatgttgagatttggaaaagtggatgtaactgaaattcagatagctttagtgattgtctttgtgttgtctgcatttggaggagcaacaatgtgggactatacgattcctattctagaaataaaattgaagatccttccagttcttggatttctaggtggagtaatattttcctgttcaaattatttccatgttatcctccatggtggtgttggcaagaatggatccactatagcaggcaccagtgtcttgtcacctggactccacataggactaattattatactggcaataatgatctataaaaagtcagcaactgatgtgtttgaaaagcatccttgtctttatatcctaatgtttggatgtgtctttgctaaagtctcacaaaaattagtggtagctcacatgaccaaaagtgaactatatcttcaagacactgtctttttggggccaggtcttttgtttttagaccagtactttaataactttatagacgaatatgttgttctatggatggcaatggtgatttcttcatttgatatggtgatatactttagtgctttgtgcctgcaaatttcaagacaccttcatctaaatatattcaagactgcatgtcatcaagcacctgaacaggttcaagttctttcttcaaagagtcatcagaataacatggattga

SEQ ID NO: 25 - DNA, 660 bp, Homo sapiens
atgaattcatctaaatcatctgaaacacaatgcacagagagaggatgcttctcttcccaaatgttcttatggactgttgctgggatccccatcctatttctcagtgcctgtttcatcaccagatgtgttgtgacatttcgcatctttcaaacctgtgatgagaaaaagtttcagctacctgagaatttcacagagctctcctgctacaattatggatcaggttcagtcaagaattgttgtccattgaactgggaatattttcaatccagctgctacttcttttctactgacaccatttcctgggcgttaagtttaaagaactgctcagccatgggggctcacctggtggttatcaactcacaggaggagcaggaattcctttcctacaagaaacctaaaatgagagagttttttattggactgtcagaccaggttgtcgagggtcagtggcaatgggtggacggcacacctttgacaaagtctctgagcttctgggatgtaggggagcccaacaacatagctaccctggaggactgtgccaccatgagagactcttcaaacccaaggcaaaattggaatgatgtaacctgtttcctcaattattttcggatttgtgaaatggtaggaataaatcctttgaacaaaggaaaatctctttaa

SEQ ID NO: 26 - DNA, 1350 bp, Homo sapiens
atgatgaagactctgctgctgtttgtggggctgctgctgacctgggagagtgggcaggtcctgggggaccagacggtctcagacaatgagctccaggaaatgtccaatcagggaagtaagtacgtcaataaggaaattcaaaatgctgtcaacggggtgaaacagataaagactctcatagaaaaaacaaacgaagagcgcaagacactgctcagcaacctagaagaagccaagaagaagaaagaggatgccctaaatgagaccagggaatcagagacaaagctgaaggagctcccaggagtgtgcaatgagaccatgatggccctctgggaagagtgtaagccctgcctgaaacagacctgcatgaagttctacgcacgcgtctgcagaagtggctcaggcctggttggccgccagcttgaggagttcctgaaccagagctcgcccttctacttctggatgaatggtgaccgcatcgactccctgctggagaacgaccggcagcagacgcacatgctggatgtcatgcaggaccacttcagccgcgcgtccagcatcatagacgagctcttccaggacaggttcttcacccgggagccccaggatacctaccactacctgcccttcagcctgccccaccggaggcctcacttcttctttcccaagtcccgcatcgtccgcagcttgatgcccttctctccgtacgagcccctgaacttccacgccatgttccagcccttccttgagatgatacacgaggctcagcaggccatggacatccacttccatagcccggccttccagcacccgccaacagaattcatacgagaaggcgacgatgaccggactgtgtgccgggagatccgccacaactccacgggctgcctgcggatgaaggaccagtgtgacaagtgccgggagatcttgtctgtggactgttccaccaacaacccctcccaggctaagctgcggcgggagctcgacgaatccctccaggtcgctgagaggttgaccaggaaatacaacgagctgctaaagtcctaccagtggaagatgctcaacacctcctccttgctggagcagctgaacgagcagtttaactgggtgtcccggctggcaaacctcacgcaaggcgaagaccagtactatctgcgggtcaccacggtggcttcccacacttctgactcggacgttccttccggtgtcactgaggtggtcgtgaagctctttgactctgatcccatcactgtgacggtccctgtagaagtctccaggaagaaccctaaatttatggagaccgtggcggagaaagcgctgcaggaataccgcaaaaagcaccgggaggagtga

SEQ ID NO: 27 - DNA, 534 bp, Homo sapiens
atgagcagcaatgagtgcttcaagtgtggacgatctggccactgggcccgggaatgtcctactggtggaggccgtggtcgtggaatgagaagccgtggcagaggtggttttacctcggatagaggtttccagtttgtttcctcgtctcttccagacatttgttatcgctgtggtgagtctggtcatcttgccaaggattgtgatcttcaggaggatgcctgctataactgcggtagaggtggccacattgccaaggactgcaaggagcccaagagagagcgagagcaatgctgctacaactgtggcaaaccaggccatctggctcgtgactgcgaccatgcagatgagcagaaatgctattcttgtggagaattcggacacattcaaaaagactgcaccaaagtgaagtgctataggtgtggtgaaactggtcatgtagccatcaactgcagcaagacaagtgaagtcaactgttaccgctgtggcgagtcagggcaccttgcacgggaatgcacaattgaggctacagcctaa

SEQ ID NO: 28 - DNA, 600 bp, Homo sapiens
atgaggttccggttctgtggtgatctggactgtcccgactgggtcctggcagaaatcagcacgctggccaagatgtcctctgtgaagttgcggctgctctgcagccaggtactaaaggagctgctgggacaggggattgattatgagaagatcctgaagctcacggctgacgccaagtttgagtcaggcgatgtgaaggccacagtggcagtgctgagtttcatcctctccagtgcggccaagcacagtgtcgatggcgaatccttgtccagtgaactgcagcagctggggctgcccaaagagcacgcggccagcctgtgccgctgttatgaggagaagcaaagccccttgcagaagcacttgcgggtctgcagcctacgcatgaataggttggcaggtgtgggctggcgggtggactacaccctgagctccagcctgctgcaatccgtggaagagcccatggtgcacctgcggctggaggtggcagctgccccagggaccccagcccagcctgttgccatgtccctctcagcagacaagttccaggtcctcctggcagaactgaagcaggcccagaccctgatgagctccctgggctga

SEQ ID NO: 29 - DNA, 717 bp, Homo sapiens
atggcagctcggactggtcatacggccttgagaagggtagtctcgggatgccgtccgaagtcggcgacagcggccggggcgcaggcgcccgtgcggaatggcagatatttagcttcctgtggtatactgatgagcagaactcttccactacatacctcaattttgcctaaggagatatgtgcacgaactttcttcaaaatcactgcaccattaataaacaaaaggaaagaatattcagagagaagaattttaggatattcaatgcaggaaatgtatgatgtagtatcgggagtggaggattacaagcattttgttccttggtgcaaaaaatcagatgttatatcaaagagatctggatattgtaaaacaagattagaaattggatttccacctgtgttggagcgatatacatcagtagtaaccttggtgaaacctcatttagtaaaggcatcttgtactgatgggagacttttcaatcatttggagactatttggcgttttagcccaggtcttcctggctacccaagaacttgtaccttggatttttcaatttcttttgaatttcgatcacttctacattcccagcttgccacactcttttttgatgaagttgtgaagcagatggtagctgcctttgaaagaagagcatgtaagctgtatggtccagaaacaaatatacctcgggagttaatgcttcatgaagtccatcacacataa

SEQ ID NO: 30 - DNA, 390 bp, Homo sapiens
atggcttcaaggttacttcgcggagctggaacgctggccgcgcaggccctgagggctcgcggccccagtggcgcggccgcgatgcgctccatggcatctggaggtggtgttcccactgatgaagagcaggcgactgggttggagagggagatcatgctggctgcaaagaagggactggacccatacaatgtactggccccaaagggagcttcaggcaccagggaagaccctaatttagtcccctccatctccaacaagagaatagtaggctgcatctgtgaagaggacaataccagcgtcgtctggttttggctgcacaaaggcgaggcccagcgatgcccccgctgtggagcccattacaagctggtgccccagcagctggcacactga

SEQ ID NO: 31 - DNA, 1431 bp, Homo sapiens
atggttggtgccatgtggaaggtgattgtttcgctggtcctgttgatgcctggcccctgtgatgggctgtttcgctccctatacagaagtgtttccatgccacctaagggagactcaggacagccattatttctcaccccttacattgaagctgggaagatccaaaaaggaagagaattgagtttggtcggccctttcccaggactgaacatgaagagttatgccggcttcctcaccgtgaataagacttacaacagcaacctcttcttctggttcttcccagctcagatacagccagaagatgccccagtagttctctggctacagggtgggccgggaggttcatccatgtttggactctttgtggaacatgggccttatgttgtcacaagtaacatgaccttgcgtgacagagacttcccctggaccacaacgctctccatgctttacattgacaatccagtgggcacaggcttcagttttactgatgatacccacggatatgcagtcaatgaggacgatgtagcacgggatttatacagtgcactaattcagtttttccagatatttcctgaatataaaaataatgacttttatgtcactggggagtcttatgcagggaaatatgtgccagccattgcacacctcatccattccctcaaccctgtgagagaggtgaagatcaacctgaacggaattgctattggagatggatattctgatcccgaatcaattatagggggctatgcagaattcctgtaccaaattggcttgttggatgagaagcaaaaaaagtacttccagaagcagtgccatgaatgcatagaacacatcaggaagcagaactggtttgaggcctttgaaatactggataaactactagatggcgacttaacaagtgatccttcttacttccagaatgttacaggatgtagtaattactataactttttgcggtgcacggaacctgaggatcagctttactatgtgaaatttttgtcactcccagaggtgagacaagccatccacgtggggaatcagacttttaatgatggaactatagttgaaaagtacttgcgagaagatacagtacagtcagttaagccatggttaactgaaatcatgaataattataaggttctgatctacaatggccaactggacatcatcgtggcagctgccctgacagagcgctccttgatgggcatggactggaaaggatcccaggaatacaagaaggcagaaaaaaaagtttggaagatctttaaatctgacagtgaagtggctggttacatccggcaagcgggtgacttccatcaggtaattattcgaggtggaggacatattttaccctatgaccagcctctgagagcttttgacatgattaatcgattcatttatggaaaaggatgggatccttatgttggataa

SEQ ID NO: 32 - DNA, 816 bp, Homo sapiens
atggaacacggctccatcatcacccaggcgcggagggaagacgccctggtgctcaccaagcaaggcctggtctccaagtcctctcctaagaagcctcgtggacgtaacatcttcaaggcccttttctgctgttttcgcgcccagcatgttggccagtcaagttcctccactgagctcgctgcgtataaggaggaagcaaacaccattgctaagtcggatctgctccagtgtctccagtaccagttctaccagatcccagggacctgcctgctcccagaggtgacagaggaagatcaaggaaggatctgtgtggtcattgacctcgatgaaacccttgtgcatagctcctttaagccaatcaacaatgctgacttcatagtgcctatagagattgaggggaccactcaccaggtgtatgtgctcaagaggccttatgtggatgagttcctgagacgcatgggggaactctttgaatgtgttctcttcactgccagcctggccaagtatgccgaccctgtgacagacctgctggaccggtgtggggtgttccgggcccgcctattccgtgagtcttgcgtgttccaccagggctgctacgtcaaggacctcagccgcctggggagggacctgagaaagaccctcatcctggacaactcgcctgcttcttacatattccaccccgagaatgcagtgcctgtgcagtcctggtttgatgacatggcagacactgagttgctgaacctgatcccaatctttgaggagctgagcggagcagaggacgtctacaccagccttgggcagctgcgggccccttag

SEQ ID NO: 33 - DNA, 1497 bp, Homo sapiens
atgacttccagtccccgggcgcctcctggagagcaaggacgcgggggagcagagatgatccgagccgcgccgccgccgctgttcctgctgctgctgctgctgctgctgctagtgtcctgggcgtcccgaggcgaggcagcccccgaccaggacgagatccagcgcctccccgggctggccaagcagccgtctttccgccagtactccggctacctcaaaggctccggctccaagcacctccactactggtttgtggagtcccagaaggatcccgagaacagccctgtggtgctttggctcaatgggggtcccggctgcagctcactagatgggctcctcacagagcatggccccttcctggtccagccagatggtgtcaccctggagtacaacccctattcttggaatctgattgccaatgtgttatacctggagtccccagctggggtgggcttctcctactccgatgacaagttttatgcaactaatgacactgaggtcgcccagagcaattttgaggcccttcaagatttcttccgcctctttccggagtacaagaacaacaaacttttcctgaccggggagagctatgctggcatctacatccccaccctggccgtgctggtcatgcaggatcccagcatgaaccttcaggggctggctgtgggcaatggactctcctcctatgagcagaatgacaactccctggtctactttgcctactaccatggccttctggggaacaggctttggtcttctctccagacccactgctgctctcaaaacaagtgtaacttctatgacaacaaagacctggaatgcgtgaccaatcttcaggaagtggcccgcatcgtgggcaactctggcctcaacatctacaatctctatgccccgtgtgctggaggggtgcccagccattttaggtatgagaaggacactgttgtggtccaggatttgggcaacatcttcactcgcctgccactcaagcggatgtggcatcaggcactgctgcgctcaggggataaagtgcgcatggaccccccctgcaccaacacaacagctgcttccacctacctcaacaacccgtacgtgcggaaggccctcaacatcccggagcagctgccacaatgggacatgtgcaactttctggtaaacttacagtaccgccgtctctaccgaagcatgaactcccagtatctgaagctgcttagctcacagaaataccagatcctattatataatggagatgtagacatggcctgcaatttcatgggggatgagtggtttgtggattccctcaaccagaagatggaggtgcagcgccggccctggttagtgaagtacggggacagcggggagcagattgccggcttcgtgaaggagttctcccacatcgcctttctcacgatcaagggcgccggccacatggttcccaccgacaagcccctcgctgccttcaccatgttctcccgcttcctgaacaagcagccatactga

SEQ ID NO: 34 - DNA, 1392 bp, Homo sapiens
atgggtgctgggccctccttgctgctcgccgccctcctgctgcttctctccggcgacggcgccgtgcgctgcgacacacctgccaactgcacctatcttgacctgctgggcacctgggtcttccaggtgggctccagcggttcccagcgcgatgtcaactgctcggttatgggaccacaagaaaaaaaagtagtggtgtaccttcagaagctggatacagcatatgatgaccttggcaattctggccatttcaccatcatttacaaccaaggctttgagattgtgttgaatgactacaagtggtttgccttttttaagtataaagaagagggcagcaaggtgaccacttactgcaacgagacaatgactgggtgggtgcatgatgtgttgggccggaactgggcttgtttcaccggaaagaaggtgggaactgcctctgagaatgtgtatgtcaacatagcacaccttaagaattctcaggaaaagtattctaataggctctacaagtatgatcacaactttgtgaaagctatcaatgccattcagaagtcttggactgcaactacatacatggaatatgagactcttaccctgggagatatgattaggagaagtggtggccacagtcgaaaaatcccaaggcccaaacctgcaccactgactgctgaaatacagcaaaagattttgcatttgccaacatcttgggactggagaaatgttcatggtatcaattttgtcagtcctgttcgaaaccaagcatcctgtggcagctgctactcatttgcttctatgggtatgctagaagcgagaatccgtatactaaccaacaattctcagaccccaatcctaagccctcaggaggttgtgtcttgtagccagtatgctcaaggctgtgaaggcggcttcccataccttattgcaggaaagtacgcccaagattttgggctggtggaagaagcttgcttcccctacacaggcactgattctccatgcaaaatgaaggaagactgctttcgttattactcctctgagtaccactatgtaggaggtttctatggaggctgcaatgaagccctgatgaagcttgagttggtccatcatgggcccatggcagttgcttttgaagtatatgatgacttcctccactacaaaaaggggatctaccaccacactggtctaagagaccctttcaacccctttgagctgactaatcatgctgttctgcttgtgggctatggcactgactcagcctctgggatggattactggattgttaaaaacagctggggcaccggctggggtgagaatggctacttccggatccgcagaggaactgatgagtgtgcaattgagagcatagcagtggcagccacaccaattcctaaattgtag

SEQ ID NO: 35 - DNA, 1008 bp, Homo sapiens
atgtgggccacgctgccgctgctctgcgccggggcctggctcctgggagtccccgtctgcggtgccgccgaactgtgcgtgaactccttagagaagtttcacttcaagtcatggatgtctaagcaccgtaagacctacagtacggaggagtaccaccacaggctgcagacgtttgccagcaactggaggaagataaacgcccacaacaatgggaaccacacatttaaaatggcactgaaccaattttcagacatgagctttgctgaaataaaacacaagtatctctggtcagagcctcagaattgctcagccaccaaaagtaactaccttcgaggtactggtccctacccaccttccgtggactggcggaaaaaaggaaattttgtctcacctgtgaaaaatcagggtgcctgcggcagttgctggactttctccaccactggggccctggagtctgcgatcgccatcgcaaccggaaagatgctgtccttggcggaacagcagctggtggactgcgcccaggacttcaataatcacggctgccaagggggtctccccagccaggctttcgagtatatcctgtacaacaaggggatcatgggtgaagacacctacccctaccagggcaaggatggttattgcaagttccaacctggaaaggccatcggctttgtcaaggatgtagccaacatcacaatctatgacgaggaagcgatggtggaggctgtggccctctacaaccctgtgagctttgcctttgaggtgactcaggacttcatgatgtatagaaccggcatctactccagtacttcctgccataaaactccagataaagtaaaccatgcagtactggctgttgggtatggagaaaaaaatgggatcccttactggatcgtgaaaaactcttggggtccccagtggggaatgaacgggtacttcctcatcgagcgcggaaagaacatgtgtggcctggctgcctgcgcctcctaccccatccctctggtgtga

SEQ ID NO: 36 - DNA, 1713 bp, Homo sapiens
atggggaactgggctgtgaatgaggggctctccatttttgtcattctggtttggctggggttgaacgtcttcctctttgtctggtattaccgggtttatgatattccacctaagttcttttacacaagaaaacttcttgggtcagcactggcactggccagggcccctgcagcctgcctgaatttcaactgcatgctgattctcttgccagtctgtcgaaatctgctgtccttcctcaggggttccagtgcgtgctgctcaacaagagttcgaagacaactggacaggaatctcacctttcataaaatggtggcatggatgattgcacttcactctgcgattcacaccattgcacatctatttaatgtggaatggtgtgtgaatgcccgagtcaataattctgatccttattcagtagcactctctgaacttggagacaggcaaaatgaaagttatctcaattttgctcgaaagagaataaagaaccctgaaggaggcctgtacctggctgtgaccctgttggcaggcatcactggagttgtcatcacgctgtgcctcatattaattatcacttcctccaccaaaaccatccggaggtcttactttgaagtcttttggtacacacatcatctctttgtgatcttcttcattggccttgccatccatggagctgaacgaattgtacgtgggcagaccgcagagagtttggctgtgcataatataacagtttgtgaacaaaaaatctcagaatggggaaaaataaaggaatgcccaatccctcagtttgctggaaaccctcctatgacttggaaatggatagtgggtcccatgtttctgtatctctgtgagaggttggtgcggttttggcgatctcaacagaaggtggtcatcaccaaggtggtcactcaccctttcaaaaccatcgagctacagatgaagaagaaggggttcaaaatggaagtgggacaatacatttttgtcaagtgcccaaaggtgtccaagctggagtggcacccttttacactgacatccgcccctgaggaagacttctttagtatccatatccgcatcgttggggactggacagaggggctgttcaatgcttgtggctgtgataagcaggagtttcaagatgcgtggaaactacctaagatagcggttgatgggccctttggcactgccagtgaagatgtgttcagctatgaggtggtgatgttagtgggagcagggattggggtcacacccttcgcatccattctcaagtcagtctggtacaaatattgcaataacgccaccaatctgaagctcaaaaagatctacttctactggctgtgccgggacacacatgcctttgagtggtttgcagatctgctgcaactgctggagagccagatgcaggaaaggaacaatgccggcttcctcagctacaacatctacctcactggctgggatgagtctcaggccaatcactttgctgtgcaccatgatgaggagaaagatgtgatcacaggcctgaaacaaaagactttgtatggacggcccaactgggataatgaattcaagacaattgcaagtcaacaccctaataccagaataggagttttcctctgtggacctgaagccttggctgaaaccctgagtaaacaaagcatctccaactctgagtctggccctcggggagtgcatttcattttcaacaaggaaaacttctaa

SEQ ID NO: 37 - DNA, 1389 bp, Homo sapiens
atgttggacttcgcgatcttcgccgttaccttcttgctggcgttggtgggagccgtgctctacctctatccggcttccagacaagctgcaggaattccagggattactccaactgaagaaaaagatggtaatcttccagatattgtgaatagtggaagtttgcatgagttcctggttaatttgcatgagagatatgggcctgtggtctccttctggtttggcaggcgcctcgtggttagtttgggcactgttgatgtactgaagcagcatatcaatcccaataagacatcggacccttttgaaaccatgctgaagtcattattaaggtatcaatctggtggtggcagtgtgagtgaaaaccacatgaggaaaaaattgtatgaaaatggtgtgactgattctctgaagagtaactttgccctcctcctaaagctttcagaagaattattagataaatggctctcctacccagagacccagcacgtgcccctcagccagcatatgcttggttttgctatgaagtctgttacacagatggtaatgggtagtacatttgaagatgatcaggaagtcattcgcttccagaagaatcatggcacagtttggtctgagattggaaaaggctttctagatgggtcacttgataaaaacatgactcggaaaaaacaatatgaagatgccctcatgcaactggagtctgttttaaggaacatcataaaagaacgaaaaggaaggaacttcagtcaacatattttcattgactccttagtacaagggaaccttaatgaccaacagatcctagaagacagtatgatattttctctggccagttgcataataactgcaaaattgtgtacctgggcaatctgttttttaaccacctctgaagaagttcaaaaaaaattatatgaagagataaaccaagtttttggaaatggtcctgttactccagagaaaattgagcagctcagatattgtcagcatgtgctttgtgaaactgttcgaactgccaaactgactccagtttctgcccagcttcaagatattgaaggaaaaattgaccgatttattattcctagagagaccctcgtcctttatgcccttggtgtggtacttcaggatcctaatacttggccatctccacacaagtttgatccagatcggtttgatgatgaattagtaatgaaaactttttcctcacttggattctcaggcacacaggagtgtccagagttgaggtttgcatatatggtgaccacagtacttcttagtgtattggtgaagagactgcacctactttctgtggagggacaggttattgaaacaaagtatgaactggtaacatcatcaagggaagaagcttggatcactgtctcaaagagatattaa

SEQ ID NO: 38 - DNA, 957 bp, Homo sapiens
atgtccgcgcacaatcggggcaccgagctcgaccttagctggatctccaaaatacaagtgaatcacccggcagttctgaggcgtgcggaacaaatccaggctcgcagaaccgtgaaaaaggagtggcaggctgcttggctcctgaaagctgttacctttatagatcttactacactttcaggtgatgatacatcttccaacattcaaaggctctgttataaagccaaatacccaatccgggaagatctcttaaaagctttaaatatgcatgataaaggcattactacagccgccgtttgtgtttatcccgcccgggtgtgtgatgctgtaaaagcactcaaggctgcaggctgtaatatccctgtggcatcagtggccgctggatttccagctggacagactcatttgaagacacgattagaagagatcagattggctgtggaagatggagctacagaaatcgacgtggtaattaacagaagcttggtgctgacaggccagtgggaagccctgtatgatgagattcgtcagtttcgcaaggcctgtggggaggctcatcttaaaactatattagcgacaggagaacttggaactcttactaatgtctataaagccagtatgatagcaatgatggcaggatcagattttattaagacctctactggaaaagaaacagtaaatgccaccttcccggtagctatagtaatgctgcgggccattagagatttcttctggaaaactggaaacaagatagggtttaaaccagcaggaggcatccgcagtgcaaaggattcccttgcttggctctctcttgtaaaggaggagcttggagatgagtggctgaagccagaactctttcgaataggtgccagtactctgctctcggacattgagaggcagatttaccatcatgtgactggaagatatgcagcttatcatgatcttccaatgtcttaa

SEQ ID NO: 39 - DNA, 3126 bp, Homo sapiens
atggcgacgccggcgggtctggagcgctgggttcaggacgagctgcactcggtgttggggctgagcgagcggcacgtcgcccagtttctgatcggtaccgcacagcgctgcacctctgccgaggagttcgtgcagcgcctacgagacactgataccttggatctcagtgggccggcccgggacttcgccctgagactctggaacaaggtaccacgaaaggcagtggtagaaaagccagctcgggcagcagagcgagaggcccgggccctgctggagaagaaccgatcttataggttactggaagacagtgaagagagcagtgaggagactgtgagtagggctggaagcagcctccagaagaaacgtaaaaagcggaaacacctcaggaagaagcgtgaggaagaagaggaggaagaggcttctgagaaagggaagaagaaaacaggggggagtaaacagcagacagagaagccagagtcggaagatgagtgggaacggacagagcgtgaacgccttcaggacctggaggagcgtgatgcctttgctgagcgggttcgacagcgggacaaggatcggactcgaaatgtcctggaacggtcagacaagaaggcttatgaagaggctcagaagcgcctcaagatggccgaggaagaccggaaggccatggtccctgagctgcggaagaaatctcgccgagagtacctggctaagcgggagcgagagaagcttgaggacctggaggcggagctggctgatgaggagttcctttttggggacgtggagctgagccggcacgagcggcaggagctcaaatataagcggcgagtgcgggatctcgcccgggagtaccgggcagctggggagcaggagaagctggaggccaccaatcgctaccacatgcccaaggaaacccgaggacagccagcccgagctgtggatctagtggaggaggaatcaggagcccctggggaggagcagcggcgctgggaggaggcgcggcttggggcagcgtccctgaagtttggggcccgagatgctgcctctcaggagcccaagtatcaactggtgctggaggaggaggagaccattgagtttgtccgggccactcagctccagggtgatgaggagccgtcagctccacccacttcaactcaggcccagcagaaagagtccatccaggccgtccgccgcagcctcccggtgttcccatttcgagaggagctcctggctgctattgcaaatcaccaagtcctcatcattgaaggcgagacaggctcagggaagaccacccagatcccgcagtatctctttgaggagggttatacaaacaagggtatgaagattgcctgcacccaaccccggagagtggctgccatgagtgtggccgcccgagtggcccgggagatgggtgtgaagcttgggaatgaggttggctacagcatccgctttgaggactgcacatcagagcgaactgtcctccgctacatgacagatgggatgcttctccgggagttcctctctgagcctgacctggcgagttacagcgtggtgatggtggatgaggcacacgaaaggaccctacacacagacattctctttggattgatcaaggatgttgctcgcttccgacctgagctcaaggtcctggtggcttcagccacaatggacactgcccgtttttccaccttctttgatgacgcccctgtgtttcgaatccccggacgcaggtttcctgtggacatcttctacaccaaggctccagaggctgactacttggaagcttgtgtagtatctgtgttgcagatccatgtgacccagccccctggggatatcctggtgttcctgacaggacaggaggagattgaggctgcctgtgagatgctccaggatcgctgccgccgcctgggctccaaaatccgggagctcctggtgctgcccatttatgccaatctgccctctgacatgcaggcccgtatcttccagcccacaccacctggggcacgaaaggtggttgtggcaacgaacattgctgagacatcactcaccattgagggcatcatttatgtgctggatccagggttctgtaagcagaagagctacaacccccgcacaggcatggaatcgctcactgtcacaccctgcagcaaggcctcagccaatcagcgagctggcagggcaggtcgggtggctgcagggaagtgcttccgcctgtataccgcctgggcctatcagcacgagcttgaggaaaccacagtgcctgagatccagaggaccagcttgggcaatgtcgtgttgctgctcaagagcttagggatccatgacctaatgcactttgatttcctggaccctccaccatatgagacactgctgctggctttggagcagctgtatgctctgggagccctcaaccaccttggggagctcaccacgtctggtcgaaagatggcagagctgccggtggaccccatgctgtccaaaatgatcttagcctctgagaagtacagctgttcagaggagatcctgacagtggctgccatgctctctgtcaacaactccatcttctaccgaccaaaggacaaggtcgtccatgctgacaatgcccgtgtcaacttctttctccctggcggtgaccacctggttctgctaaatgtttacacacagtgggctgagagtggttactcttcccagtggtgctatgagaactttgtacagttcagatcgatgcgccgagcccgggatgtgcgggaacagctggaagggctcttggaacgtgtggaagttggtctcagttcctgccagggggactatatccgtgtacgcaaggccatcactgctggttacttttaccacacggcacggttgactcggagtggctaccgcacagtgaaacagcagcagacagtcttcattcatcccaactcctccctctttgagcaacagccacgctggctgctctaccacgaacttgtcttgaccaccaaagagttcatgagacaggtactggagattgagagcagttggcttctggaggtggctccccattattataaggccaaggagctagaagatccccatgctaagaaaatgcccaaaaaaataggcaaaacacgagaagagctagggtaa

SEQ ID NO: 40 - DNA, 3306 bp, Homo sapiens
atggagcagcccggggcggcggcgtcgggagcgggaggcggcagcgaggaacccggtgggggccggagcaacaagcggagcgcggggaaccgggccgccaatgaagaggaaacgaaaaacaaacccaaattgaacattcaaataaaaactttggcagatgatgtgcgtgaccgaattacaagttttagaaaatctactgtcaaaaaagaaaaacctcttattcaacatcctattgattctcaagtcgcgatgagtgagtttcctgcagctcagccattatatgatgaacgatctttgaatttgtcagaaaaggaagtattggatctctttgaaaaaatgatggaggacatgaaccttaacgaagagaaaaaagctcctttacgaaacaaagactttaccaccaaacgtgagatggttgtccagtatatttctgccactgccaaatctggtgggctgaaaaacagcaaacatgaatgcaccctgtcttcacaagaatatgttcatgaattacgatcgggtatatcagatgagaaacttcttaattgcctagaatccctcagggtttctttaaccagcaatccggtcagctgggttaacaactttggccatgaaggtcttggactcttattggatgagctggaaaagcttctggacaaaaaacagcaagaaaatattgacaagaagaatcagtataaacttattcaatgcctcaaagcatttatgaataataagtttggattacaaaggattctaggagatgaaagaagtcttttactattggcaagagcaattgaccccaaacaacccaacatgatgactgaaatagtaaaaatactttctgctatttgcattgttggagaagagaacattctagataaacttttaggggctataacaacagcagcagaaagaaataacagggaacgattttcaccaattgtggaaggtttagaaaatcaggaagccttgcaattacaggtggcctgcatgcagtttataaatgcccttgtcacttctccttatgagcttgattttcgaatacatttaaggaatgaattcctccgttcaggactaaaaacaatgttaccagatctaaaagaaaaagagaatgatgagcttgatattcagttgaaagtatttgatgaaaacaaagaagatgacctaactgaattatcacaccgtctcaatgacattcgagcagaaatggatgatatgaatgaagtctaccatcttctatataatatgctgaaggacactgctgctgaaaattacttcttatctattctacaacattttttgcttatcagaaatgattattatatcaggccacaatattataaaataattgaggaatgtgtttcacagatagtgctacactgcagtggtatggatccagacttcaaatacaggcaaagattagacatcgatttaactcatctgatagattcttgtgtgaacaaggcgaaagttgaagaaagtgaacaaaaagctgcagagttttcaaagaagttcgatgaagaattcacagctcgacaggaagctcaagcagagcttcaaaaaagagatgagaaaatcaaagaacttgaagcagaaatccagcaacttcgaacccaggcacaagtactctcaagttcatcaggaattccaggtcctcctgcagcacctccattgccaggtgtagggccgcctccaccaccacccgcgccacctctacccggaggagctcctcttcctcctccaccacctcctttacctggaatgatggggataccaccaccacccccaccaccacttttatttgggggacctcctccaccaccaccccttggaggagttcctcctcccccaggaatatcacttaatctaccttatggaatgaagcagaaaaaaatgtataaacctgaagtgtccatgaagagaatcaattggtcaaagattgaacccacagaattatctgagaactgtttctggttaagagtcaaagaagacaagtttgagaatccagatctctttgccaaattggcattgaattttgctactcagataaaagttcaaaagaacgcagaagcattagaagaaaagaagactgggcctacaaagaagaaagtgaaagaactgagaattttggatcccaaaacagctcagaatctgtccatctttctgggatcatatcgcatgccatatgaagacataagaaacgttattctggaggttaatgaagacatgctgagtgaggctttaattcagaaccttgtgaaacatcttcctgagcagaagatactcaacgaattagcagagcttaagaatgaatatgatgacctctgtgagcctgaacaatttggagttgtgatgagctctgtgaaaatgttacagcctcgtctcagtagtatcctgttcaagctcacatttgaagaacacataaacaacatcaaaccaagcatcatagcagtaactcttgcctgtgaagaactgaagaaaagtgaaagctttaacagacttttagagttagttcttcttgttggaaactacatgaactcaggctcaagaaatgcccagtctttgggatttaagatcaacttcctttgtaagatcagagatactaaatcagcggatcaaaaaacaacccttttgcattttattgccgacatttgtgaggaaaaatatcgagatatcctaaaatttcctgaagaactggaacacgtagaaagtgcaagcaaagtttcagctcaaattctcaagagcaaccttgcatcaatggaacaacaaattgttcatctggaacgtgacatcaagaaattcccccaagcagaaaatcaacacgataagtttgtggaaaagatgaccagctttacaaagactgcccgagaacagtatgaaaaactctccaccatgcacaacaacatgatgaagctctatgagaatcttggagaatacttcatttttgactcaaagacagtgagcatagaagagttctttggtgatctcaacaacttccgaactttgtttttggaagcagtgagagaaaacaataagagaagagaaatggaagagaagaccaggagggcaaaacttgcaaaagagaaagctgaacaagaaaagttagaacgccagaagaaaaagaaacaactcattgatataaacaaagagggtgatgagactggtgtgatggataatcttctagaagccctacaatcaggtgcagcattcagagaccgtcgaaagcggattccaaggaatccagataacagacgagtacctttggaaaggtcacgctctcgccacaatggagctatctcatctaagtga

SEQ ID NO: 41 - DNA, 1362 bp, Homo sapiens
atgctgtcccgatcccgctgtgtgtctcgggcgttcagccgctcgctctccgccttccagaaggggaactgccctctagggagacgttccctgcctggggtctccttatgccagggaccaggttaccctaacagcaggaaggttgtcattaacaacagtgtcttcagtgttcgctttttcagaactacagctgtatgcaaggatgacttggttacagtcaaaaccccagcgtttgcagaatctgtcacagagggagatgtcaggtgggagaaagctgttggagacacagttgcagaagatgaagtggtttgtgagattgaaactgacaagacatctgtgcaggttccatcaccagcaaatggcgtgattgaagctcttttggtacctgatgggggaaaagtcgaaggaggcactccacttttcacactcaggaaaactggtgctgctcctgctaaggccaagccggctgaagctcctgctgctgcagccccaaaagcagaacctacagcagcggcagttcctccccctgcagcacccatacccactcagatgccaccggtgccctcgccctcacagcctccttctggcaaacctgtgtctgcagtaaaacccactgttgccccaccactagctgagccaggagctggcaaaggtctgcgttcagaacatcgggagaaaatgaacaggatgcggcagcgcattgctcagcgtctgaaggaggcccagaatacatgtgcaatgctgacaacttttaatgagattgacatgagtaacatccaggagatgagggctcggcacaaagaggcttttttgaagaaacataacctcaaactaggcttcatgtcggcatttgtgaaggcctcagcctttgccttgcaggaacagcctgttgtaaatgcagtgattgacgacacaaccaaagaggtggtgtatagggattatattgacatcagtgttgcagtggccaccccacggggtctggtggttccagtcatcaggaatgtggaagctatgaattttgcagatattgaacggaccatcactgaactgggagagaaggcccgaaagaatgaacttgccattgaagatatggatggcggtaccttcaccattagcaatggaggcgtttttggctcgctctttggaacacccattatcaacccccctcagtctgccatcctggggatgcatggcatctttgacaggccagtggctataggaggcaaggtagaggtgcggcccatgatgtacgtggcactgacctatgatcaccggctgattgatggcagagaggctgtgactttcctccgcaaaatcaaggcagcggtagaggatcccagagtcctcctcctggatctttag

SEQ ID NO: 42 - DNA, 1224 bp, Homo sapiens
atgtctggtggctccgcggattataacagagaacatggcggcccagagggaatggaccccgatggtgtcatcgagagcaactggaatgagattgttgataactttgatgatatgaatttaaaggagtctctccttcgtggcatctatgcttacggttttgagaagccttccgctattcagcagagagctattattccctgtattaaagggtatgatgtgattgctcaagctcagtcaggtactggcaagacagccacatttgctatttccatcctgcaacagttggagattgagttcaaggagacccaagcactagtattggcccccaccagagaactggctcaacagatccaaaaggtaattctggcacttggagactatatgggagccacttgtcatgcctgcattggtggaacaaatgttcgaaatgaaatgcaaaaactgcaggctgaagcaccacatattgttgttggtacacccgggagagtgtttgatatgttaaacagaagatacctttctccaaaatggatcaaaatgtttgttttggatgaagcagatgaaatgttgagccgtggttttaaggatcaaatctatgagattttccaaaaactaaacacaagtattcaggttgtgttgctttctgccacaatgccaactgatgtgttggaagtgaccaaaaaattcatgagagatccaattcgaattctggtgaaaaaggaagaattgacccttgaaggaatcaaacagttttatattaatgttgagagagaggaatggaagttggatacactttgtgacttgtacgagacactgaccattacacaggctgttatttttctcaatacgaggcgcaaggtggactggctgactgagaagatgcatgccagagacttcacagtttctgctctgcatggtgacatggaccagaaggagagagatgttatcatgagggaattccggtcagggtcaagtcgtgttctgatcactactgacttgttggctcgcgggattgatgtgcaacaagtgtctttggttataaattatgatctacctaccaatcgtgaaaactatattcacagaattggcagagggggtcgatttgggaggaaaggtgtggctataaactttgttactgaagaagacaagaggattcttcgtgacattgagactttctacaatactacagtggaggagatgcccatgaatgtggctgaccttatttaa

SEQ ID NO: 43 - DNA, 738 bp, Homo sapiens
atgaacaacaagttcgacgctttgaaagatgatgacagtggggaccatgatcagaatgaagaaaacagcacacagaaagatggtgagaaggaaaaaacggaacgagacaagaatcagagcagtagcaagagaaaggctgttgtccctggaccggcagagcatcccctgcagtacaactacactttttggtactccaggagaacccccggccgtcccacgagctcacagagctatgaacagaatatcaaacagattggcacctttgcctctgtggagcagttctggaggttttatagccacatggtacgtcctggggacctgacaggccacagtgacttccatctcttcaaagaaggaattaaacccatgtgggaggatgatgcaaataaaaatggtggcaagtggattattcggctgcggaagggcttggcctcccgttgctgggagaatctcattttggccatgctgggggaacagttcatggttggggaggagatctgtggggctgtggtgtctgtccgctttcaggaagacattatttcaatatggaataagactgccagtgaccaagcaaccacagcccgaatccgggacacacttcggcgagtgcttaacctacctcccaacaccattatggaatacaaaactcacaccgacagcatcaaaatgccaggcaggctgggcccccaaaggctcctttttcaaaacctctggaagccgcggttgaatgtgccatga

SEQ ID NO: 44 - DNA, 492 bp, Homo sapiens
atgtcactcctcttgctggtggtctcagcccttcacatcctcattcttatactgcttttcgtggccactttggacaagtcctggtggactctccctgggaaagagtccctgaatctctggtacgactgcacgtggaacaacgacaccaaaacatgggcctgcagtaatgtcagcgagaatggctggctgaaggcggtgcaggtcctcatggtgctctccctcattctctgctgtctctccttcatcctgttcatgttccagctctacaccatgcgacgaggaggtctcttctatgccaccggcctctgccagctttgcaccagcgtggcggtgtttactggcgccttgatctatgccattcacgccgaggagatcctggagaagcacccgcgagggggcagcttcggatactgcttcgccctggcctgggtggccttccccctcgccctggtcagcggcatcatctacatccacctacggaagcgggagtga

SEQ ID NO: 45 - DNA, 1305 bp, Homo sapiens
atgtctattctcaagatccatgccagggagatctttgactctcgcgggaatcccactgttgaggttgatctcttcacctcaaaaggtctcttcagagctgctgtgcccagtggtgcttcaactggtatctatgaggccctagagctccgggacaatgataagactcgctatatggggaagggtgtctcaaaggctgttgagcacatcaataaaactattgcgcctgccctggttagcaagaaactgaacgtcacagaacaagagaagattgacaaactgatgatcgagatggatggaacagaaaataaatctaagtttggtgcgaacgccattctgggggtgtcccttgccgtctgcaaagctggtgccgttgagaagggggtccccctgtaccgccacatcgctgacttggctggcaactctgaagtcatcctgccagtcccggcgttcaatgtcatcaatggcggttctcatgctggcaacaagctggccatgcaggagttcatgatcctcccagtcggtgcagcaaacttcagggaagccatgcgcattggagcagaggtttaccacaacctgaagaatgtcatcaaggagaaatatgggaaagatgccaccaatgtgggggatgaaggcgggtttgctcccaacatcctggagaataaagaaggcctggagctgctgaagactgctattgggaaagctggctacactgataaggtggtcatcggcatggacgtagcggcctccgagttcttcaggtctgggaagtatgacctggacttcaagtctcccgatgaccccagcaggtacatctcgcctgaccagctggctgacctgtacaagtccttcatcaaggactacccagtggtgtctatcgaagatccctttgaccaggatgactggggagcttggcagaagttcacagccagtgcaggaatccaggtagtgggggatgatctcacagtgaccaacccaaagaggatcgccaaggccgtgaacgagaagtcctgcaactgcctcctgctcaaagtcaaccagattggctccgtgaccgagtctcttcaggcgtgcaagctggcccaggccaatggttggggcgtcatggtgtctcatcgttcgggggagactgaagataccttcatcgctgacctggttgtggggctgtgcactgggcagatcaagactggtgccccttgccgatctgagcgcttggccaagtacaaccagctcctcagaattgaagaggagctgggcagcaaggctaagtttgccggcaggaacttcagaaaccccttggccaagtaa

SEQ ID NO: 46 - DNA, 1569 bp, Homo sapiens
atgaggctgcgggtgcggcttctgaagcggacctggccgctggaggtgcccgagacggagccgacgctggggcatttgcgctcgcacctgaggcagtccctgctgtgcacctgggggtacagttctaatacccgatttacaattacattgaactacaaggatcccctcactggagatgaagagaccttggcttcatatgggattgtttctggggacttgatatgtttgattcttcaagatgacattccagcgcctaatataccttcatccacagattcagagcattcttcactccagaataatgagcaaccctctttggccaccagctccaatcagactagcatgcaggatgaacaaccaagtgattcattccaaggacaggcagcccagtctggtgtttggaatgacgacagtatgttagggcctagtcaaaattttgaagctgagtcaattcaagataatgcgcatatggcagagggcacaggtttctatccctcagaacccatgctctgtagtgaatcggtggaagggcaagtgccacattcattagagaccttgtatcaatcagctgactgttctgatgccaatgatgccttgatagtgttgatacatcttctcatgttggagtcaggttacatacctcagggcaccgaagccaaagcactgtccatgccggagaagtggaagttgagcggggtgtataagctgcagtacatgcatcctctctgcgagggcagctccgctactctcacctgtgtgcctttgggaaacctgattgttgtaaatgctacactaaaaatcaacaatgagattagaagtgtgaaaagattgcagctgctaccagaatcttttatttgcaaagagaaactaggggaaaatgtagccaacatatacaaagatcttcagaaactctctcgcctctttaaagaccagctggtgtatcctcttctggcttttacccgacaagcactgaacctaccagatgtatttgggttggtcgtcctcccattggaactgaaactacggatcttccgacttctggatgttcgttccgtcttgtctttgtctgcggtttgtcgtgacctctttactgcttcaaatgacccactcctgtggaggtttttatatctgcgtgattttcgagacaatactgtcagagttcaagacacagattggaaagaactgtacaggaagaggcacatacaaagaaaagaatccccgaaagggcggtttgtgatgctcctgccatcgtcaactcacaccattccattctatcccaaccccttgcaccctaggccatttcctagctcccgccttcctccaggaattatcgggggtgaatatgaccaaagaccaacacttccctatgttggagacccaatcagttcactcattcctggtcctggggagacgcccagccagtttcctccactgagaccacgctttgatccagttggcccacttccaggacctaaccccatcttgccagggcgaggcggccccaatgacagatttccctttagacccagcaggggtcggccaactgatggccggctgtcattcatgtga

SEQ ID NO: 47 - DNA, 261 bp, Homo sapiens
atgattccagcagtggtcttgctcttactccttttggttgaacaagcagcggccctgggagagcctcagctctgctatatcctggatgccatcctgtttctgtatggaattgtcctcaccctcctctactgtcgactgaagatccaagtgcgaaaggcagctataaccagctatgagaaatcagatggtgtttacacgggcctgagcaccaggaaccaggagacttacgagactctgaagcatgagaaaccaccacagtag

SEQ ID NO: 48 - DNA, 1320 bp, Homo sapiens
atgaagctggctaactggtactggctgagctcagctgttcttgccacttacggttttttggttgtggcaaacaatgaaacagaggaaattaaagatgaaagagcaaaggatgtctgcccagtgagactagaaagcagagggaaatgcgaagaggcaggggagtgcccctaccaggtaagcctgccccccttgactattcagctcccgaagcaattcagcaggatcgaggaggtgttcaaagaagtccaaaacctcaaggaaatcgtaaatagtctaaagaaatcttgccaagactgcaagctgcaggctgatgacaacggagacccaggcagaaacggactgttgttacccagtacaggagccccgggagaggttggtgataacagagttagagaattagagagtgaggttaacaagctgtcctctgagctaaagaatgccaaagaggagatcaatgtacttcatggtcgcctggagaagctgaatcttgtaaatatgaacaacatagaaaattatgttgacagcaaagtggcaaatctaacatttgttgtcaatagtttggatggcaaatgttcaaagtgtcccagccaagaacaaatacagtcacgtccagttcaacatctaatatataaagattgctctgactactacgcaataggcaaaagaagcagtgagacctacagagttacacctgatcccaaaaatagtagctttgaagtttactgtgacatggagaccatggggggaggctggacagtgctgcaggcacgtctcgatgggagcaccaacttcaccagaacatggcaagactacaaagcaggctttggaaacctcagaagggaattttggctggggaacgataaaattcatcttctgaccaagagtaaggaaatgattctgagaatagatcttgaagactttaatggtgtcgaactatatgccttgtatgatcagttttatgtggctaatgagtttctcaaatatcgtttacacgttggtaactataatggcacagctggagatgcattacgtttcaacaaacattacaaccacgatctgaagtttttcaccactccagataaagacaatgatcgatatccttctgggaactgtgggctgtactacagttcaggctggtggtttgatgcatgtctttctgcaaacttaaatggcaaatattatcaccaaaaatacagaggtgtccgtaatgggattttctggggtacctggcctggtgtaagtgaggcacaccctggtggctacaagtcctccttcaaagaggctaagatgatgatcagacccaagcactttaagccataa

SEQ ID NO: 49 - DNA, 1581 bp, Homo sapiens
atggtgaatgaaggtcccaaccaggaagagagcgatgacacccctgtgccggagtccgcactccaagcggaccccagcgtctcggtccatcccagcgtctcggtccatcccagcgtctccatcaaccccagcgtctctgtccaccccagcagttcggcccaccccagtgccttagcccaacccagtggcttggctcaccccagtagctcgggccctgaggacctcagcgtgatcaaggtgagcaggcgccgttgggccgtggtcctggtgtttagctgctactccatgtgcaactcctttcagtggatccagtacggctccatcaataacatcttcatgcacttctacggtgtcagtgcctttgccattgactggctgtccatgtgctacatgctgacttacatccctctgctcctgccagtggcttggctgctggagaagttcggcctgcgcaccattgctctcactggctcggctctcaactgcctgggggcctgggtgaagctgggcagcctgaagccgcatctctttccggtcaccgtggtgggccagctcatctgctctgtggcccaggttttcatcctgggcatgccctcccgcatcgcttccgtctggttcggggctaatgaggtttcaacagcctgctccgtggctgtctttggcaatcagcttggaattgcgattgggttcttggtccctcctgttttggtacccaacattgaagaccgggacgagcttgcctaccacatcagcatcatgttctatataataggaggtgtggccactctcctcctcatccttgtcatcattgtgttcaaggagaaacctaaatatccccccagcagggcccaatccctgagctatgccttgacctctcctgatgcctcatacttaggttccatcgcccggctcttcaaaaatctcaactttgtgctgcttgtcatcacctatggtctgaatgctggtgctttttatgccttgtccactcttctgaatcgcatggtgatctggcactacccgggggaagaagtgaatgctggaagaattggcctgacgatcgtcattgcaggaatgcttggggctgtgatctcaggaatctggctggataggtccaaaacctacaaagagacaaccctggtagtctatatcatgacactggtgggcatggtggtgtacacgtttaccttgaacctgggacacctgtgggtagtgttcatcactgctggcacaatgggcttctttatgactggctatctcccactgggatttgagtttgctgtggagctcacgtacccagaatcagaaggcatctcctccggcctcctcaacatatctgcacaggtatttgggatcatctttaccatctcccagggccagattattgacaactatggaaccaagcctgggaacatcttcctgtgtgtgttccttactcttggagcagccctcactgcattcattaaggcagatctccggagacagaaagcaaacaaagaaactcttgagaacaaactccaagaggaggaggaggagagcaacaccagcaaagtgcccactgctgtgtcagaggatcatctctga

SEQ ID NO: 50 - DNA, 528 bp, Homo sapiens
atgagctcccagattcgtcagaattattccaccgacgtggaggcagccgtcaacagcctggtcaatttgtacctgcaggcctcctacacctacctctctctgggcttctatttcgaccgcgatgatgtggctctggaaggcgtgagccacttcttccgcgaattggccgaggagaagcgcgagggctacgagcgtctcctgaagatgcaaaaccagcgtggcggccgcgctctcttccaggacatcaagaagccagctgaagatgagtggggtaaaaccccagacgccatgaaagctgccatggccctggagaaaaagctgaaccaggcccttttggatcttcatgccctgggttctgcccgcacggacccccatctctgtgacttcctggagactcacttcctagatgaggaagtgaagcttatcaagaagatgggtgaccacctgaccaacctccacaggctgggtggcccggaggctgggctgggcgagtatctcttcgaaaggctcactctcaagcacgactaa

SEQ ID NO: 51 - DNA, 2385 bp, Homo sapiens
atggagctgaggccctggttgctatgggtggtagcagcaacaggaaccttggtcctgctagcagctgatgctcagggccagaaggtcttcaccaacacgtgggctgtgcgcatccctggaggcccagcggtggccaacagtgtggcacggaagcatgggttcctcaacctgggccagatcttcggggactattaccacttctggcatcgaggagtgacgaagcggtccctgtcgcctcaccgcccgcggcacagccggctgcagagggagcctcaagtacagtggctggaacagcaggtggcaaagcgacggactaaacgggacgtgtaccaggagcccacagaccccaagtttcctcagcagtggtacctgtctggtgtcactcagcgggacctgaatgtgaaggcggcctgggcgcagggctacacagggcacggcattgtggtctccattctggacgatggcatcgagaagaaccacccggacttggcaggcaattatgatcctggggccagttttgatgtcaatgaccaggaccctgacccccagcctcggtacacacagatgaatgacaacaggcacggcacacggtgtgcgggggaagtggctgcggtggccaacaacggtgtctgtggtgtaggtgtggcctacaacgcccgcattggaggggtgcgcatgctggatggcgaggtgacagatgcagtggaggcacgctcgctgggcctgaaccccaaccacatccacatctacagtgccagctggggccccgaggatgacggcaagacagtggatgggccagcccgcctcgccgaggaggccttcttccgtggggttagccagggccgaggggggctgggctccatctttgtctgggcctcggggaacgggggccgggaacatgacagctgcaactgcgacggctacaccaacagtatctacacgctgtccatcagcagcgccacgcagtttggcaacgtgccgtggtacagcgaggcctgctcgtccacactggccacgacctacagcagtggcaaccagaatgagaagcagatcgtgacgactgacttgcggcagaagtgcacggagtctcacacgggcacctcagcctctgcccccttagcagccggcatcattgctctcaccctggaggccaataagaacctcacatggcgggacatgcaacacctggtggtacagacctcgaagccagcccacctcaatgccaacgactgggccaccaatggtgtgggccggaaagtgagccactcatatggctacgggcttttggacgcaggcgccatggtggccctggcccagaattggaccacagtggccccccagcggaagtgcatcatcgacatcctcaccgagcccaaagacatcgggaaacggctcgaggtgcggaagaccgtgaccgcgtgcctgggcgagcccaaccacatcactcggctggagcacgctcaggcgcggctcaccctgtcctataatcgccgtggcgacctggccatccacctggtcagccccatgggcacccgctccaccctgctggcagccaggccacatgactactccgcagatgggtttaatgactgggccttcatgacaactcattcctgggatgaggatccctctggcgagtgggtcctagagattgaaaacaccagcgaagccaacaactatgggacgctgaccaagttcaccctcgtactctatggcaccgcccctgaggggctgcccgtacctccagaaagcagtggctgcaagaccctcacgtccagtcaggcctgtgtggtgtgcgaggaaggcttctccctgcaccagaagagctgtgtccagcactgccctccagggttcgccccccaagtcctcgatacgcactatagcaccgagaatgacgtggagaccatccgggccagcgtctgcgccccctgccacgcctcatgtgccacatgccaggggccggccctgacagactgcctcagctgccccagccacgcctccttggaccctgtggagcagacttgctcccggcaaagccagagcagccgagagtccccgccacagcagcagccacctcggctgcccccggaggtggaggcggggcaacggctgcgggcagggctgctgccctcacacctgcctgaggtggtggccggcctcagctgcgccttcatcgtgctggtcttcgtcactgtcttcctggtcctgcagctgcgctctggctttagttttcggggggtgaaggtgtacaccatggaccgtggcctcatctcctacaaggggctgccccctgaagcctggcaggaggagtgcccgtctgactcagaagaggacgagggccggggcgagaggaccgcctttatcaaagaccagagcgccctctga

SEQ ID NO: 52 - DNA, 1239 bp, Homo sapiens
atgacggatctatactacctcagtcagacagatggagcaggtgattggcgggaaaaagaggccaaagatctgacagaactggttcagcggagaataacatatcttcagaatcccaaggactgcagcaaagccaaaaagctggtgtgtaatatcaacaaaggctgtggctatggctgtcagctccatcatgtggtctactgcttcatgattgcatatggcacccagcgaacactcatcttggaatctcagaattggcgctatgctactggtggatgggagactgtatttaggcctgtaagtgagacatgcacagacagatctggcatctccactggacactggtcaggtgaagtgaaggacaaaaatgttcaagtggtcgagcttcccattgtagacagtcttcatccccgtcctccatatttacccttggctgtaccagaagacctcgcagatcgacttgtacgagtgcatggtgaccctgcagtgtggtgggtgtctcagtttgtcaaatacttgatccgcccacagccttggctagaaaaagaaatagaagaagccaccaagaagcttggcttcaaacatccagttattggagtccatgtcagacgcacagacaaagtgggaacagaagctgccttccatcccattgaagagtacatggtgcatgttgaagaacattttcagcttcttgcacgcagaatgcaagtggacaaaaaaagagtgtatttggccacagatgacccttctttattaaaggaggcaaaaacaaagtaccccaattatgaatttattagtgataactctatttcctggtcagctggactgcacaatcgatacacagaaaattcacttcgtggagtgatcctggatatacattttctctctcaggcagacttcctagtgtgtactttttcatcccaggtctgtcgagttgcttatgaaattatgcaaacactacatcctgatgcctctgcaaacttccattctttagatgacatctactattttgggggccagaatgcccacaatcaaattgccatttatgctcaccaaccccgaactgcagatgaaattcccatggaacctggagatatcattggtgtggctggaaatcattgggatggctattctaaaggtgtcaacaggaaattgggaaggacgggcctatatccctcctacaaagttcgagagaagatagaaacggtcaagtaccccacatatcctgaggctgagaaataa

SEQ ID NO: 53 - DNA, 1866 bp, Homo sapiens
atggcggagctgacggtggaggttcgcggctctaacggggctttctacaagggatttatcaaagatgttcatgaagactcccttacagttgtttttgaaaataattggcaaccagaacgccaggttccatttaatgaagttagattaccaccaccacctgatataaaaaaagaaattagtgaaggagatgaagtagaggtatattcaagagcaaatgaccaagagccatgtgggtggtggttggctaaagttcggatgatgaaaggagaattttatgtcattgaatatgctgcttgtgacgctacttacaatgaaatagtcacatttgaacgacttcggcctgtcaatcaaaataaaactgtcaaaaaaaataccttctttaaatgcacagtggatgttcctgaggatttgagagaggcgtgtgctaatgaaaatgcacataaagattttaagaaagcagtaggagcatgcagaattttttaccatccagaaacaacacagctaatgatactgtctgccagtgaagcaactgtgaagagagtaaacatcttaagtgacatgcatttgcgaagtattcgtacgaagttgatgcttatgtccagaaatgaagaggccactaagcatttagaatgcacaaaacaacttgcagcagcttttcatgaggaatttgttgtgagagaagatttaatgggcctggcaataggaacacatggtagtaacatccagcaagctaggaaggttcctggagttaccgccattgagctagatgaagatactggaacattcagaatctacggagagagtgctgatgctgtaaaaaaggctagaggtttcttggaatttgtggaggattttattcaggttcctaggaatctcgttggaaaagtaattggaaaaaatggcaaagttattcaagaaatagtggacaaatctggtgtggttcgagtgagaattgaaggggacaatgaaaataaattacccagagaagacggtatggttccatttgtatttgttggcactaaagaaagcattggaaatgtgcaggttcttctagagtatcatattgcctatctaaaggaagtagaacagctaagaatggaacgcctacagattgatgaacagctgcgacagattggttctaggtcttatagcggaagaggcagaggtcgtcggggacctaattacacctccggttatggtacaaattctgagctgtctaacccctctgaaacggaatctgagcgtaaagacgagctgagtgattggtcattggcaggagaagatgatcgagacagccgacatcagcgtgacagcaggagacgcccaggaggaagaggcagaagtgtttcagggggtcgaggtcgtggtggaccacgtggtggcaaatcctccatcagttctgtgctcaaagatccagacagcaatccatacagcttacttgataatacagaatcagatcagactgcagacactgatgccagcgaatctcatcacagtactaaccgtcgtaggcggtctcgtagacgaaggactgatgaagatgctgttctgatggatggaatgactgaatctgatacagcttcagttaatgaaaatgggctagtcacagttgcagattatatttctagagctgagtctcagagcagacaaagaaacctcccaagggaaactttggctaaaaacaagaaagaaatggcaaaagatgtgattgaagagcatggtccttcagaaaaggcaataaacggcccaactagtgcttctggcgatgacatttctaagctacagcgtactccaggagaagaaaagattaataccttaaaagaagaaaacactcaagaagcagcagtcctgaatggtgtttcataa

SEQ ID NO: 54 - DNA, 1008 bp, Homo sapiens
atggggaaggtgaaggtcggagtcaacggatttggtcgtattgggcgcctggtcaccagggctgcttttaactctggtaaagtggatattgttgccatcaatgaccccttcattgacctcaactacatggtttacatgttccaatatgattccacccatggcaaattccatggcaccgtcaaggctgagaacgggaagcttgtcatcaatggaaatcccatcaccatcttccaggagcgagatccctccaaaatcaagtggggcgatgctggcgctgagtacgtcgtggagtccactggcgtcttcaccaccatggagaaggctggggctcatttgcaggggggagccaaaagggtcatcatctctgccccctctgctgatgcccccatgttcgtcatgggtgtgaaccatgagaagtatgacaacagcctcaagatcatcagcaatgcctcctgcaccaccaactgcttagcacccctggccaaggtcatccatgacaactttggtatcgtggaaggactcatgaccacagtccatgccatcactgccacccagaagactgtggatggcccctccgggaaactgtggcgtgatggccgcggggctctccagaacatcatccctgcctctactggcgctgccaaggctgtgggcaaggtcatccctgagctgaacgggaagctcactggcatggccttccgtgtccccactgccaacgtgtcagtggtggacctgacctgccgtctagaaaaacctgccaaatatgatgacatcaagaaggtggtgaagcaggcgtcggagggccccctcaagggcatcctgggctacactgagcaccaggtggtctcctctgacttcaacagcgacacccactcctccacctttgacgctggggctggcattgccctcaacgaccactttgtcaagctcatttcctggtatgacaacgaatttggctacagcaacagggtggtggacctcatggcccacatggcctccaaggagtaa

SEQ ID NO: 55 - DNA, 1011 bp, Homo sapiens
atgtccaatatggagaacagctttgacgatgtttcttgcctctctccccagaacctgggatcctcatcgccaagcaaaaagcagagcaaggaaaacaccatcacaataaactgtgtgacgttccctcacccagacacgatgccggaacagcagctgctgaaaccaaccgagtggagctactgcgactacttctgggctgataagaaggacccccaaggcaacggcaccgtggctgggtttgaactactgctccagaaacagctgaagggcaaacaaatgcagaaggaaatgtcagaattcatccgggaaaggataaagattgaagaagactatgcgaagaacttagctaagctctctcagaactccttggcttcacaggaggaaggctccttgggagaggcgtgggcccaggtgaagaagagcctggcggacgaagcagaagttcacctcaagttctctgccaagcttcacagcgaggtggagaagcccctgatgaacttccgtgagaacttcaagaaagacatgaagaagtgcgaccaccacattgccgaccttcgcaagcagctcgccagccgctatgcctcggtggagaaggcccggaaagccctcacagagcggcagagagacctggagatgaagacccagcagctggagatcaagctgagcaacaagacagaggaggacatcaagaaggcgcggagaaagtccacacaggctggagacgacctcatgcgctgtgtggatctctacaaccaggcccagtccaaatggtttgaagagatggtgaccaccacattggagctagagcggctggaggtggagagggtagagatgatccggcagcacctgtgccagtacacgcagctgcggcatgaaacagacatgttcaaccaaagcacagtcgagcccgtggatcagctgcttcgaaaagtggacccggccaaagacagggagctgtgggtcagagagcacaagacgggcaacatccgccctgtggacatggagatctag

SEQ ID NO: 56 - DNA, 1776 bp, Homo sapiens
atggctccagagatcaacttgccgggcccaatgagcctcattgataacactaaagggcagctggtggtgaatccagaagctctgaagatcctatctgcaattacgcagcctgtggtggtggtggcgattgtgggcctctatcgcacaggcaaatcctacctgatgaacaagctggctgggaagaaaaacggcttctctctaggctccacagtgaagtctcacaccaagggaatctggatgtggtgtgtgcctcatcccaagaagccagaacacaccctagttctgctcgacactgagggcctgggagatatagagaagggtgacaatgagaatgactcctggatctttgccttggccatcctcctgagcagcaccttcgtgtacaatagcatgggaaccatcaaccagcaggccatggaccaacttcactatgtgacagagctgacagatcgaatcaaggcaaactcctcacctggtaacaattctgtagacgactcagctgactttgtgagcttttttccagcatttgtgtggactctcagagatttcaccctggaactggaagtagatggagaacccatcactgctgatgactacttggagctttcgctaaagctaagaaaaggtactgataagaaaagtaaaagctttaatgatcctcggttgtgcatccgaaagttcttccccaagaggaagtgcttcgtcttcgattggcccgctcctaagaagtaccttgctcacctagagcagctaaaggaggaagagctgaaccctgatttcatagaacaagttgcagaattttgttcctacatcctcagccattccaatgtcaagactctttcaggtggcattccagtcaatgggcctcgtctagagagcctggtgctgacctacgtcaatgccatcagcagtggggatctaccctgcatggagaacgcagtcctggccttggcccagatagagaactcagccgcagtggaaaaggctattgcccactatgaacagcagatgggccagaaggtgcagctgcccacggaaaccctccaggagctgctggacctgcacagggacagtgagagagaggccattgaagtcttcatgaagaactctttcaaggatgtggaccaaatgttccagaggaaattaggggcccagttggaagcaaggcgagatgacttttgtaagcagaattccaaagcatcatcagattgttgcatggctttacttcaggatatatttggccctttagaagaagatgtcaagcagggaacattttctaaaccaggaggttaccgtctctttactcagaagctgcaggagctgaagaataagtactaccaggtgccaaggaaggggatacaggccaaagaggtgctgaaaaaatatttggagtccaaggaggatgtggctgatgcacttctacagactgatcagtcactctcagaaaaggaaaaagcgattgaagtggaacgtataaaggctgaatctgcagaagctgcaaagaaaatgttggaggaaatacaaaagaagaatgaggagatgatggaacagaaagagaagagttatcaggaacatgtgaaacaattgactgagaagatggagagggacagggcccagttaatggcagagcaagagaagaccctcgctcttaaacttcaggaacaggaacgccttctcaaggagggattcgagaatgagagcaagagacttcaaaaagacatatgggatatccagatgagaagcaaatcattggagccaatatgtaacatactctaa

SEQ ID NO: 57 - DNA, 990 bp, Homo sapiens
atggcagcccaatacggcagtatgagcttcaaccccagcacaccaggggccagttatgggcctggaaggcaagagcccagaaattcccaattgagaattgtgttagtgggtaaaaccggagcaggaaaaagtgcaacaggaaacagcatccttggccggaaagtgtttcattctggcactgcagcaaaatccattaccaagaagtgtgagaaacgcagcagctcatggaaggaaacagaacttgtcgtagttgacacaccaggcattttcgacacagaggtgcccaatgctgaaacgtccaaggagattattcgctgcattcttctgacctccccagggcctcatgctctgcttctggtggttccactgggccgttacactgaggaagagcacaaagccacagagaagatcctgaaaatgtttggagagagggctagaagtttcatgattctcatattcacccggaaagatgacttaggtgacaccaatttgcatgactacttaagggaagctccagaagacattcaagacttgatggacattttcggtgaccgctactgtgcgttaaacaacaaggcaacaggcgctgagcaggaggcccagagggcacagttgctgggcctgatccagcgcgtggtgagggagaacaaggaaggctgctacactaataggatgtaccaaagggcggaggaggagatccagaagcaaacacaagcaatgcaagaactccacagagtggagctggagagagagaaagcgcggataagagaggagtatgaagagaaaatcagaaagctggaagataaagtggagcaggaaaagagaaagaagcaaatggagaagaaactagcagaacaggaggctcactatgctgtaaggcagcaaagggcaagaacggaagtggagagtaaggatgggatacttgaattaatcatgacagcgttacagattgcttcctttattttgttacgtctgttcgcggaagattaa

SEQ ID NO: 58 - DNA, 897 bp, Homo sapiens
atggctgctcgcagagctctgcacttcgtattcaaagtgggaaaccgcttccagacggcgcgtttctatcgggacgtcctggggatgaaggttctgcggcatgaggaatttgaagaaggctgcaaagctgcctgtaatgggccttatgatgggaaatggagtaaaacaatggtgggatttgggcctgaggatgatcattttgtcgcagaactgacttacaattatggcgtcggagactacaagcttggcaatgactttatgggaatcacgctcgcttctagccaggctgtcagcaacgccaggaagctggagtggccactgacggaagttgcagaaggtgtttttgaaaccgaggccccgggaggatataagttctatttgcagaatcgcagtctgcctcagtcagatcctgtattaaaagtaactctagcagtgtctgatcttcaaaagtccttgaactactggtgtaatctactgggaatgaaaatttatgaaaaagatgaagaaaagcaaagggctttgctgggctatgctgataaccagtgtaagctggagctacagggcgtcaagggtggggtggaccatgcagcagcttttggaagaattgccttctcttgcccccagaaagagttgccagacttagaagacttgatgaaaagggagaaccagaagattctgactcccctggtgagcctggacaccccagggaaagcaacagtacaggtggtcattctggccgaccctgacggacatgaaatttgctttgtcggggatgaagcatttcgagaactttctaagatggatccagagggaagcaaattgttggatgatgcaatggcagcagataaaagtgacgagtggtttgccaaacacaataaacccaaagcttcaggttaa

SEQ ID NO: 59 - DNA, 1659 bp, Homo sapiens
atgcggctcctgcctctagccccaggtcggctccggcggggcagcccccgccacctgccctcctgcagcccagcgctgctactgctggtgctgggcggctgcctgggggtcttcggggtggctgcgggaacccggaggcccaacgtggtgctgctcctcacggacgaccaggacgaagtgctcggcggcatgacaccgctaaagaaaaccaaagctctcatcggagagatggggatgactttttccagtgcttatgtgccaagtgctctctgctgccccagcagagccagtatcctgacaggaaagtacccacataatcatcacgttgtgaacaacactctggaggggaactgcagtagtaagtcctggcagaagatccaagaaccaaatactttcccagcaattctcagatcaatgtgtggttatcagaccttttttgcagggaaatatttaaatgagtacggagccccagatgcaggtggactagaacacgttcctctgggttggagttactggtatgccttggaaaagaattctaagtattataattacaccctgtctatcaatgggaaggcacggaagcatggtgaaaactatagtgtggactacctgacagatgttttggctaatgtctccttggactttctggactacaagtccaactttgagcccttcttcatgatgatcgccactccagcgcctcattcgccttggacagctgcacctcagtaccagaaggctttccagaatgtctttgcaccaagaaacaagaacttcaacatccatggaacgaacaagcactggttaattaggcaagccaagactccaatgactaattcttcaatacagtttttagataatgcatttaggaaaaggtggcaaactctcctctcagttgatgaccttgtggagaaactggtcaagaggctggagttcactggggagctcaacaacacttacatcttctatacctcagacaatggctatcacacaggacagttttccttgccaatagacaagagacagctgtatgagtttgatatcaaagttccactgttggttcgaggacctgggatcaaaccaaatcagacaagcaagatgctggttgccaacattgacttgggtcctactattttggacattgctggctacgacctaaataagacacagatggatgggatgtccttattgcccattttgagaggtgccagtaacttgacctggcgatcagatgtcctggtggaataccaaggagaaggccgtaacgtcactgacccaacatgcccttccctgagtcctggcgtatctcaatgcttcccagactgtgtatgtgaagatgcttataacaatacctatgcctgtgtgaggacaatgtcagcattgtggaatttgcagtattgcgagtttgatgaccaggaggtgtttgtagaagtctataatctgactgcagacccagaccagatcactaacattgctaaaaccatagacccagagcttttaggaaagatgaactatcggttaatgatgttacagtcctgttctgggccaacctgtcgcactccaggggtttttgaccccggatacaggtttgacccccgtctcatgttcagcaatcgcggcagtgtcaggactcgaagattttccaaacatcttctgtag

SEQ ID NO: 60 - DNA, 993 bp, Homo sapiens
atggaagctgttgccaagtttgatttcactgcttcaggtgaggatgaactgagctttcacactggagatgttttgaagattttaagtaaccaagaggagtggtttaaggcggagcttgggagccaggaaggatatgtgcccaagaatttcatagacatccagtttcccaaatggtttcacgaaggcctctctcgacaccaggcagagaacttactcatgggcaaggaggttggcttcttcatcatccgggccagccagagctccccaggggacttctccatctctgtcaggcatgaggatgacgttcaacacttcaaggtcatgcgagacaacaagggtaattactttctgtggactgagaagtttccatccctaaataagctggtagactactacaggacaaattccatctccagacagaagcagatcttccttagagacagaacccgagaagaccagggtcaccggggcaacagcctggaccggaggtcccagggaggcccacacctcagtggggctgtgggagaagaaatccgaccttcgatgaaccggaagctgtcggatcaccccccgacccttcccctgcagcagcaccagcaccagccacagcctccgcaatatgccccagcgccccagcagctgcagcagcccccacagcagcgatatctgcagcaccaccatttccaccaggaacgccgaggaggcagccttgacataaatgatgggcattgtggcaccggcttgggcagtgaaatgaatgcggccctcatgcatcggagacacacagacccagtgcagctccaggcggcagggcgagtgcggtgggcccgggcgctgtatgactttgaggccctggaggatgacgagctggggttccacagcggggaggtggtggaggtcctggatagctccaacccatcctggtggaccggccgcctgcacaacaagctgggcctcttccctgccaactacgtggcacccatgacccgataa

SEQ ID NO: 61 - DNA, 726 bp, Homo sapiens
atgtccggggagtcagccaggagcttggggaagggaagcgcgcccccggggccggtcccggagggctcgatccgcatctacagcatgaggttctgcccgtttgctgagaggacgcgtctagtcctgaaggccaagggaatcaggcatgaagtcatcaatatcaacctgaaaaataagcctgagtggttctttaagaaaaatccctttggtctggtgccagttctggaaaacagtcagggtcagctgatctacgagtctgccatcacctgtgagtacctggatgaagcatacccagggaagaagctgttgccggatgacccctatgagaaagcttgccagaagatgatcttagagttgttttctaaggtgccatccttggtaggaagctttattagaagccaaaataaagaagactatgctggcctaaaagaagaatttcgtaaagaatttaccaagctagaggaggttctgactaataagaagacgaccttctttggtggcaattctatctctatgattgattacctcatctggccctggtttgaacggctggaagcaatgaagttaaatgagtgtgtagaccacactccaaaactgaaactgtggatggcagccatgaaggaagatcccacagtctcagccctgcttactagtgagaaagactggcaaggtttcctagagctctacttacagaacagccctgaggcctgtgactatgggctctga

SEQ ID NO: 62 - DNA, 570 bp, Homo sapiens
atgttgggcatgatcaagaactcgctgttcggaagcgtagagacgtggccttggcaggtcctaagcaaaggggacaaggaagaagttgcctatgaagaaagggcctgtgaaggcggcaaatttgccacagtagaagtgacagataagcctgtggatgaggctctacgggaagcaatgcccaaggtcgcaaagtatgcggggggcaccaatgacaagggaattgggatggggatgacagtccctatttcctttgctgtgttccccaatgaagatggctctctgcagaagaaattaaaagtctggttccggattccaaaccaatttcaaagcgacccaccagctcccagtgacaaaagcgttaagattgaggaacgggaaggcatcactgtctattccatgcagtttggtggttatgccaaggaagcagactacgtagcacaagccacccgtctgcgtgctgccctggagggcacagccacctaccggggggacatctacttctgcacgggttatgaccctcccatgaagccctacggacggcgcaatgagatctggctgttgaagacatga

SEQ ID NO: 63 - DNA, 381 bp, Homo sapiens
atgcctgaaccagtcaaatctgctccagtccctaaaaaaggctccaagaaggccattaacaaggctcagaagaaggatggaaagaagcgcaaacgcagccgcaaggagagctactctgtgtatgtgtacaaggtgctgaagcaggtccaccccgacaccggcatctcttccaaggctatgggaatcatgaactccttcgtcaacgacatctttgagcgtatcgccggagaagcgtcacgcctggcgcattacaacaagcgctcgaccatcacttcgagggagatccagacggccgtgcgcctactgctacccggggaattggccaagcacgccgtgtccgagggcaccaaggccgtcaccaagtataccagctccaagtga

SEQ ID NO: 64 - DNA, 411 bp, Homo sapiens
atggctcgtacgaagcaaacagctcgcaagtctaccggcggcaaagctccgcgcaagcagcttgctactaaagcagcccgtaagagcgctccggccaccggtggcgtgaagaaacctcatcgctaccgcccgggcaccgtggccttgcgcgaaatccgtcgctaccagaagtccaccgagctgctgatccggaagctgccgttccagcgcctggtgcgagaaatcgcccaggacttcaaaaccgacctgcgtttccagagctctgcggtgatggcgctgcaggaggcttgtgaggcctacctggtgggactcttcgaagacaccaatctgtgcgctattcacgctaaacgcgtcaccatcatgcccaaagatatccagctggcacgtcgcatccgtggggaaagggcataa

SEQ ID NO: 65 - DNA, 312 bp, Homo sapiens
atgtctgggcgcggcaaaggcgggaagggtctgggcaaaggaggcgctaagcgccaccgcaaagttctgcgcgacaacattcagggcatcaccaagcccgccatccgacgcctggcacggcgtggaggcgttaagcgcatctcaggccttatatacgaggagacacgcggagttcttaaagtgtttttggagaatgtaatccgcgatgcagttacctacacggagcacgccaaacgcaagacagtcacagccatggacgtggtttacgcgctcaagcgccagggccgcaccctgtatggctttggcggctga

SEQ ID NO: 66 - DNA, 783 bp, Homo sapiens
atgcgccctgaagacagaatgttccatatcagagctgtgatcttgagagccctctccttggctttcctgctgagtctccgaggagctggggccatcaaggcggaccatgtgtcaacttatgccgcgtttgtacagacgcatagaccaacaggggagtttatgtttgaatttgatgaagatgagatgttctatgtggatctggacaagaaggagaccgtctggcatctggaggagtttggccaagccttttcctttgaggctcagggcgggctggctaacattgctatattgaacaacaacttgaataccttgatccagcgttccaaccacactcaggccaccaacgatccccctgaggtgaccgtgtttcccaaggagcctgtggagctgggccagcccaacaccctcatctgccacattgacaagttcttcccaccagtgctcaacgtcacgtggctgtgcaacggggagctggtcactgagggtgtcgctgagagcctcttcctgcccagaacagattacagcttccacaagttccattacctgacctttgtgccctcagcagaggacttctatgactgcagggtggagcactggggcttggaccagccgctcctcaagcactgggaggcccaagagccaatccagatgcctgagacaacggagactgtgctctgtgccctgggcctggtgctgggcctagtcggcatcatcgtgggcaccgtcctcatcataaagtctctgcgttctggccatgacccccgggcccaggggaccctgtga

SEQ ID NO: 67 - DNA, 954 bp, Homo sapiens
atgtcccacggccccaagcagcccggcgcggccgccgcgccggcgggcggcaaggctccgggccagcatgggggcttcgtggtgactgtcaagcaagagcgcggcgagggtccacgcgcgggcgagaaggggtcccacgaggaggagccggtgaagaaacgcggctggcccaagggcaagaagcggaagaagattctgccgaatgggcccaaggcaccggtcacgggctacgtgcgcttcctgaacgagcggcgcgagcagatccgcacgcgccacccggatctgccctttcccgagatcaccaagatgctgggcgccgagtggagcaagctgcagccaacggaaaagcagcggtacctggatgaggccgagagagagaagcagcagtacatgaaggagctgcgggcgtaccagcagtctgaagcctataagatgtgcacggagaagatccaggagaagaagatcaagaaagaagactcgagctctgggctcatgaacactctcctgaatggacacaagggtggggactgcgatggcttctccaccttcgatgttcccatcttcactgaagagttcttggaccaaaacaaagcgcgtgaggcggagcttcggcgcttgcggaagatgaatgtggccttcgaggagcagaacgcggtactgcagaggcacacgcagagcatgagcagcgcgcgcgagcgtctggagcaggagctggcgctggaggagcggaggacgctggcgctgcagcagcagctccaggccgtgcgccaggcgctcaccgccagcttcgcctcactgccggtgccgggcacgggcgaaacgcccacgctgggcactctggacttctacatggcccggcttcacggagccatcgagcgcgaccccgcccagcacgagaagctcatcgtccgcatcaaggaaatcctggcccaggtcgccagcgagcacctgtga

SEQ ID NO: 68 - DNA, 273 bp, Homo sapiens
atgcccaagagaaaggcaaaaggagatgctaaaggtgataaagcaaaggtgaaggatgagccacagaggagatcagctcggttgtctgctaaaccagctcctccaaaaccagagcccaggcctaaaaaggcctctgcaaagaagggagagaagcttcccaaagggagaaaggggaaagcagatgctggaaaggatgggaacaaccctgcaaaaaaccgagatgcctctacactccagtcccagaaagcggaaggcactggggatgccaagtga

SEQ ID NO: 69 - DNA, 675 bp, Homo sapiens
atgagttcctatttcgtgaactccaccttccccgtcactctggccagcgggcaggagtccttcctgggccagctaccgctctattcgtcgggctatgcggacccgctgagacattaccccgcgccctacgggccagggccgggccaggacaagggctttgccacttcctcctattacccgccggcgggcggtggctacggccgagcggcgccctgcgactacgggccggcgccggccttctaccgcgagaaagagtcggcctgcgcactctccggcgccgacgagcagcccccgttccaccccgagccgcggaagtcggactgcgcgcaggacaagagcgtgttcggcgagacagaagagcagaagtgctccactccggtctacccgtggatgcagcggatgaattcgtgcaacagttcctcctttgggcccagcggccggcgaggccgccagacatacacacgttaccagacgctggagctggagaaggagtttcactacaatcgctacctgacgcggcggcggcgcatcgagatcgcgcacgccctgtgcctgacggagaggcagatcaagatatggttccagaaccgacgcatgaagtggaaaaaggagagcaaactgctcagcgcgtctcagctcagtgccgaggaggaggaagaaaaacaggccgagtga

SEQ ID NO: 70 - DNA, 2523 bp, Homo sapiens
atgtcggtggtgggcatagacctgggcttccagagctgctacgtcgctgtggcccgcgccggcggcatcgagactatcgctaatgagtatagcgaccgctgcacgccggcttgcatttcttttggtcctaagaatcgttcaattggagcagcagctaaaagccaggtaatttctaatgcaaagaacacagtccaaggatttaaaagattccatggccgagcattctctgatccatttgtggaggcagaaaaatctaaccttgcatatgatattgtgcagttgcctacaggattaacaggtataaaggtgacatatatggaggaagagcgaaattttaccactgagcaagtgactgccatgcttttgtccaaactgaaggagacagccgaaagtgttcttaagaagcctgtagttgactgtgttgtttcggttccttgtttctatactgatgcagaaagacgatcagtgatggatgcaacacagattgctggtcttaattgcttgcgattaatgaatgaaaccactgcagttgctcttgcatatggaatctataagcaggatcttcctgccttagaagagaaaccaagaaatgtagtttttgtagacatgggccactctgcttatcaagtttctgtatgtgcatttaatagaggaaaactgaaagttctggccactgcatttgacacgacattgggaggtagaaaatttgatgaagtgttagtaaatcacttctgtgaagaatttgggaagaaatacaagctagacattaagtccaaaatccgtgcattattacgactctctcaggagtgtgagaaactcaagaaattgatgagtgcaaatgcttcagatctccctttgagcattgaatgttttatgaatgatgttgatgtatctggaactatgaatagaggcaaatttctggagatgtgcaatgatctcttagctagagtggagccaccacttcgtagtgttttggaacaaaccaagttaaagaaagaagatatttatgcagtggagatagttggtggtgctacacgaatccctgcggtaaaagagaagatcagcaaatttttcggtaaagaacttagtacaacattaaatgctgatgaagctgtcactcgaggctgtgcattgcagtgtgccatcttatcgcctgctttcaaagtcagagaattttctatcactgatgtagtaccatatccaatatctctgagatggaattctccagctgaagaagggtcaagtgactgtgaagtcttttccaaaaatcatgctgctcctttctctaaagttcttacattttatagaaaggaacctttcactcttgaggcctactacagctctcctcaggatttgccctatccagatcctgctatagctcagttttcagttcagaaagtcactcctcagtctgatggctccagttcaaaagtgaaagtcaaagttcgagtaaatgtccatggcattttcagtgtgtccagtgcatctttagtggaggttcacaagtctgaggaaaatgaggagccaatggaaacagatcagaatgcaaaggaggaagagaagatgcaagtggaccaggaggaaccacatgttgaagagcaacagcagcagacaccagcagaaaataaggcagagtctgaagaaatggagacctctcaagctggatccaaggataaaaagatggaccaaccaccccaagccaagaaggcaaaagtgaagaccagtactgtggacctgccaatcgagaatcagctattatggcagatagacagagagatgctcaacttgtacattgaaaatgagggtaagatgatcatgcaggataaactggagaaggagcggaatgatgctaagaacgcagtggaggaatatgtgtatgaaatgagagacaagcttagtggtgaatatgagaagtttgtgagtgaagatgatcgtaacagttttactttgaaactggaagatactgaaaattggttgtatgaggatggagaagaccagccaaagcaagtttatgttgataagttggctgaattaaaaaatctaggtcaacctattaagatacgtttccaggaatctgaagaacgaccaaaattatttgaagaactagggaaacagatccaacagtatatgaaaataatcagctctttcaaaaacaaggaggaccagtatgatcatttggatgctgctgacatgacaaaggtagaaaaaagcacaaatgaagcaatggagtggatgaataacaagctaaatctgcagaacaagcagagtttgaccatggatccagttgtcaagtcaaaagagattgaagctaaaattaaggagctgacaagtacttgtagccctataatttcaaagcccaaacccaaagtggaacctccaaaagaggaacaaaaaaatgcagagcagaatggaccagtggatggacaaggagacaacccaggcccccaggctgctgagcagggtacagacacagctgtgccttcggattcagacaagaagcttcctgaaatggacattgattga

SEQ ID NO: 71 - DNA, 360 bp, Homo sapiens
atgaaggcgctgagcccggtgcgcggctgctacgaggcggtgtgctgcctgtcggaacgcagtctggccatcgcccggggccgagggaagggcccggcagctgaggagccgctgagcttgctggacgacatgaaccactgctactcccgcctgcgggaactggtacccggagtcccgagaggcactcagcttagccaggtggaaatcctacagcgcgtcatcgactacattctcgacctgcaggtagtcctggccgagccagcccctggaccccctgatggcccccaccttcccatccagacagccgagctcactccggaacttgtcatctccaacgacaaaaggagcttttgccactga

SEQ ID NO: 72 - DNA, 1437 bp, Homo sapiens
atgagtacaaatggtgatgatcatcaggtcaaggatagtctggagcaattgagatgtcactttacatgggagttatccattgatgacgatgaaatgcctgatttagaaaacagagtcttggatcagattgaattcctagacaccaaatacagtgtgggaatacacaacctactagcctatgtgaaacacctgaaaggccagaatgaggaagccctgaagagcttaaaagaagctgaaaacttaatgcaggaagaacatgacaaccaagcaaatgtgaggagtctggtgacctggggcaactttgcctggatgtattaccacatgggcagactggcagaagcccagacttacctggacaaggtggagaacatttgcaagaagctttcaaatcccttccgctatagaatggagtgtccagaaatagactgtgaggaaggatgggccttgctgaagtgtggaggaaaaaattatgaacgggccaaggcctgctttgaaaaggtgcttgaagtggaccctgaaaaccctgaatccagcgctgggtatgcgatctctgcctatcgcctggatggctttaaattagccacaaaaaatcacaagccattttctttgcttcccctaaggcaggctgtccgcttaaatccagacaatggatatattaaggttctccttgccctgaagcttcaggatgaaggacaggaagctgaaggagaaaagtacattgaagaagctctagccaacatgtcctcacagacctatgtctttcgatatgcagccaagttttaccgaagaaaaggctctgtggataaagctcttgagttattaaaaaaggccttgcaggaaacacccacttctgtcttactgcatcaccagatagggctttgctacaaggcacaaatgatccaaatcaaggaggctacaaaagggcagcctagagggcagaacagagaaaagctagacaaaatgataagatcagccatatttcattttgaatctgcagtggaaaaaaagcccacatttgaggtggctcatctagacctggcaagaatgtatatagaagcaggcaatcacagaaaagctgaagagaattttcaaaaattgttatgcatgaaaccagtggtagaagaaacaatgcaagacatacatttccactatggtcggtttcaggaatttcaaaagaaatctgacgtcaatgcaattatccattatttaaaagctataaaaatagaacaggcatcattaacaagggataaaagtatcaattctttgaagaaattggttttaaggaaacttcggagaaaggcattagatctggaaagcttgagcctccttgggttcgtctacaaattggaaggaaatatgaatgaagccctggagtactatgagcgggccctgagactggctgctgactttgagaactctgtgagacaaggtccttag

SEQ ID NO: 73 - DNA, 1014 bp, Homo sapiens
atgcgaccgacgctgctgtggtcgctgctgctgctgctcggagtcttcgccgccgccgccgcggccccgccagaccctctttcccagctgcccgctcctcagcacccgaagattcgcctgtacaacgcagagcaggtcctgagttgggagccagtggccctgagcaatagcacgaggcctgttgtctaccaagtgcagtttaaatacaccgacagtaaatggttcacggccgacatcatgtccataggggtgaattgtacacagatcacagcaacagagtgtgacttcactgccgccagtccctcagcaggcttcccaatggatttcaatgtcactctacgccttcgagctgagctgggagcactccattctgcctgggtgacaatgccttggtttcaacactatcggaatgtgactgtcgggcctccagaaaacattgaggtgaccccaggagaaggctccctcatcatcaggttctcctctccctttgacatcgctgatacctccacggcctttttttgttattatgtccattactgggaaaaaggaggaatccaacaggtcaaaggccctttcagaagcaactccatttcattggataacttaaaaccctccagagtgtactgtttacaagtccaggcacaactgctttggaacaaaagtaacatctttagagtcgggcatttaagcaacatatcttgctacgaaacaatggcagatgcctccactgagcttcagcaagtcatcctgatctccgtgggaacattttcgttgctgtcggtgctggcaggagcctgtttcttcctggtcctgaaatatagaggcctgattaaatactggtttcacactccaccaagcatcccattacagatagaagagtatttaaaagacccaactcagcccatcttagaggccttggacaaggacagctcaccaaaggatgacgtctgggactctgtgtccattatctcgtttccggaaaaggagcaagaagatgttctccaaacgctttga

SEQ ID NO: 74 - DNA, 1380 bp, Homo sapiens
atgacaattctaggtacaacttttggcatggttttttctttacttcaagtcgtttctggagaaagtggctatgctcaaaatggagacttggaagatgcagaactggatgactactcattctcatgctatagccagttggaagtgaatggatcgcagcactcactgacctgtgcttttgaggacccagatgtcaacatcaccaatctggaatttgaaatatgtggggccctcgtggaggtaaagtgcctgaatttcaggaaactacaagagatatatttcatcgagacaaagaaattcttactgattggaaagagcaatatatgtgtgaaggttggagaaaagagtctaacctgcaaaaaaatagacctaaccactatagttaaacctgaggctccttttgacctgagtgtcgtctatcgggaaggagccaatgactttgtggtgacatttaatacatcacacttgcaaaagaagtatgtaaaagttttaatgcacgatgtagcttaccgccaggaaaaggatgaaaacaaatggacgcatgtgaatttatccagcacaaagctgacactcctgcagagaaagctccaaccggcagcaatgtatgagattaaagttcgatccatccctgatcactattttaaaggcttctggagtgaatggagtccaagttattacttcagaactccagagatcaataatagctcaggggagatggatcctatcttactaaccatcagcattttgagttttttctctgtcgctctgttggtcatcttggcctgtgtgttatggaaaaaaaggattaagcctatcgtatggcccagtctccccgatcataagaagactctggaacatctttgtaagaaaccaagaaaaaatttaaatgtgagtttcaatcctgaaagtttcctggactgccagattcatagggtggatgacattcaagctagagatgaagtggaaggttttctgcaagatacgtttcctcagcaactagaagaatctgagaagcagaggcttggaggggatgtgcagagccccaactgcccatctgaggatgtagtcatcactccagaaagctttggaagagattcatccctcacatgcctggctgggaatgtcagtgcatgtgacgcccctattctctcctcttccaggtccctagactgcagggagagtggcaagaatgggcctcatgtgtaccaggacctcctgcttagccttgggactacaaacagcacgctgccccctccattttctctccaatctggaatcctgacattgaacccagttgctcagggtcagcccattcttacttccctgggatcaaatcaagaagaagcatatgtcaccatgtccagcttctaccaaaaccagtga

SEQ ID NO: 75 - DNA, 555 bp, Homo sapiens
atggtgcggaagcttaagttccacgagcagaagctgctgaagcaggtggacttcctgaactgggaggtcaccgaccacaacctgcacgagctgcgcgtgctgcggcgttaccggctgcagcggcgggaggactacacgcgctacaaccagctgagccgtgccgtgcgtgagctggcgcggcgcctgcgcgacctgcccgaacgcgaccagttccgcgtgcgcgcttcggccgcgctgctggacaagctgtatgctctcggcttggtgcccacgcgcggttcgctggagctctgcgacttcgtcacggcctcgtccttctgccgccgccgcctccccaccgtgctcctcaagctgcgcatggcgcagcaccttcaggctgccgtggcctttgtggagcaagggcacgtacgcgtgggccctgacgtggttaccgaccccgccttccttgtcacgcgcagcatggaggactttgtcacttgggtggactcgtccaagatcaagcggcacgtgctagagtacaatgaggagcgcgatgacttcgatctggaagcctag

SEQ ID NO: 76 - DNA, 1800 bp, Homo sapiens
atggaggggccactcactccaccaccgctgcagggaggcggagccgccgctgttccggagcccggagcccggcaacacccgggacacgagacggcggcgcagcggtacagcgcccgactgctgcaggccggctacgagcccgagagccctagattggacctcgctacacacccgacgacaccccgttcagaactatcttcagtggtcttactggcaggtgttggtgtccagatggatcgccttcgcagggctagcatggcggactacctgatcagcggcggcaccggctacgtgcccgaggatgggctcaccgcgcagcagctcttcgccagcgccgacggcctcacctacaacgacttcctgattctcccaggattcatagacttcatagctgatgaggtggacctgacctcagccctgacccggaagatcacgctgaagacgccactgatctcctcccccatggacactgtgacagaggctgacatggccattgccatggctctgatgggaggtattggtttcattcaccacaactgcaccccagagttccaggccaacgaggtgcggaaggtcaagaagtttgaacagggcttcatcacggaccctgtggtgctgagcccctcgcacactgtgggcgatgtgctggaggccaagatgcggcatggcttctctggcatccccatcactgagacgggcaccatgggcagcaagctggtgggcatcgtcacctcccgagacatcgactttcttgctgagaaggaccacaccaccctcctcagtgaggtgatgacgccaaggattgaactggtggtggctccagcaggtgtgacgttgaaagaggcaaatgagatcctgcagcgtagcaagaaagggaagctgcctatcgtcaatgattgcgatgagctggtggccatcatcgcccgcaccgacctgaagaagaaccgagactaccctctggcctccaaggattcccagaagcagctgctctgtggggcagctgtgggcacccgtgaggatgacaaataccgtctggacctgctcacccaggcgggcgtcgacgtcatagtcttggactcgtcccaagggaattcggtgtatcagatcgccatggtgcattacatcaaacagaagtacccccacctccaggtgattggggggaacgtggtgacagcagcccaggccaagaacctgattgatgctggtgtggacgggctgcgcgtgggcatgggctgcggctccatctgcatcacccaggaagtgatggcctgtggtcggccccagggcactgctgtgtacaaggtggctgagtatgcccggcgctttggtgtgcccatcatagccgatggcggcatccagaccgtgggacacgtggtcaaggccctggcccttggagcctccacagtgatgatgggctccctgctggccgccactacggaggcccctggcgagtacttcttctcagacggggtgcggctcaagaagtaccggggcatgggctcactggatgccatggagaagagcagcagcagccagaaacgatacttcagcgagggggataaagtgaagatcgcgcagggtgtctcgggctccatccaggacaaaggatccattcagaagttcgtgccctacctcatagcaggcatccaacacggctgccaggatatcggggcccgcagcctgtctgtccttcggtccatgatgtactcaggagagctcaagtttgagaagcggaccatgtcggcccagattgagggtggtgtccatggcctgcactcttacgaaaagcggctgtactga

SEQ ID NO: 77 - DNA, 1200 bp, Homo sapiens
atgtcagatatcctccgggagctgctctgtgtctctgagaaggctgctaacattgcccgggcgtgcagacagcaggaagccctcttccagctgctgatcgaagaaaagaaagagggagaaaagaacaagaagtttgcagttgacttcaagacgctggctgatgtactggtacaggaagttataaaacagaatatggagaacaagtttccaggcttggaaaaaaatatttttggagaagaatccaatgagtttactaatgactggggggaaaagattaccttgaggttgtgttcaacagaggaggaaacagcagagcttcttagcaaagtcctcaatggtaacaaggtggcatctgaagcattagccagggttgttcatcaggatgttgcctttactgacccaactctggattccacagagatcaatgttccacaggacattttgggaatttgggtggaccccatagattcaacttatcagtatataaaaggttctgctgacattaaatccaaccagggaatcttcccctgtggacttcagtgtgtcaccattttaattggtgtctatgacatacagacaggggttcccctgatgggagtcatcaatcaaccttttgtgtcacgagatccaaacaccctcaggtggaaaggacagtgctattggggcctttcttacatggggaccaacatgcattcactacagctcaccatctctagaagaaacggcagtgaaacacacactggaaacaccggctctgaggcagcattctcccccagtttttcagccgtaattagtacaagtgaaaaggagactatcaaagctgcattgtcacgtgtgtgtggagatcgcatatttggggcagctggggctggttataagagcctatgtgttgtccaaggcctcgttgacatttacatcttttcagaagataccacattcaaatgggactcttgtgctgctcatgccatactgagggccatgggtgggggaatagtagacttgaaagaatgcttagaaagaaatccagaaacagggcttgatttgccacagttggtgtaccacgtggaaaatgagggtgctgctggggtggatcggtgggccaacaagggaggactcattgcatacagatccaggaagcggctggagacattcctgagcctcctggtccaaaacctggcacctgcagagacgcatacctag

SEQ ID NO: 78 - DNA, 546 bp, Homo sapiens
atggctgggagccgtgaggtggtggccatggactgcgagatggtggggctggggccccaccgggagagtggcctggctcgttgcagcctcgtgaacgtccacggtgctgtgctgtacgacaagttcatccggcctgagggagagatcaccgattacagaacccgggtcagcggggtcacccctcagcacatggtgggggccacaccatttgccgtggccaggctagagatcctgcagctcctgaaaggcaagctggtggtgggtcatgacctgaagcacgacttccaggcactgaaagaggacatgagcggctacacaatctacgacacgtccactgacaggctgttgtggcgtgaggccaagctggaccactgcaggcgtgtctccctgcgggtgctgagtgagcgcctcctacacaagagcatccagaacagcctgcttggacacagctcggtggaagatgcgagggcaacgatggagctctatcaaatctcccagagaatccgagcccgccgagggctgccccgcctggctgtgtcagactga

SEQ ID NO: 79 - DNA, 3492 bp, Homo sapiens
atgaccaggaccagggcagcactcctcctgttcacagccttagcaacttctctaggtttcaacttggacacagaggagctgacagccttccgtgtggacagcgctgggtttggagacagcgtggtccagtatgccaactcctgggtggtggttggagccccccaaaagataacagctgccaaccaaacgggtggcctctaccagtgtggctacagcactggtgcctgtgagcccatcggcctgcaggtgcccccggaggccgtgaacatgtccctgggcctgtccctggcgtctaccaccagcccttcccagctgctggcctgcggccccaccgtgcaccacgagtgcgggaggaacatgtacctcaccggactctgcttcctcctgggccccacccagctcacccagaggctcccggtgtccaggcaggagtgcccaagacaggagcaggacattgtgttcctgatcgatggctcaggcagcatctcctcccgcaactttgccacgatgatgaacttcgtgagagctgtgataagccagttccagagacccagcacccagttttccctgatgcagttctccaacaaattccaaacacacttcactttcgaggaattcaggcgcagctcaaaccccctcagcctgttggcttctgttcaccagctgcaagggtttacatacacggccaccgccatccaaaatgtcgtgcaccgattgttccatgcctcatatggggcccgtagggatgccgccaaaattctcattgtcatcactgatgggaagaaagaaggcgacagcctggattataaggatgtcatccccatggctgatgcagcaggcatcatccgctatgcaattggggttggattagcttttcaaaacagaaattcttggaaagaattaaatgacattgcatcgaagccctcccaggaacacatatttaaagtggaggactttgatgctctgaaagatattcaaaaccaactgaaggagaagatctttgccattgagggtacggagaccacaagcagtagctccttcgaattggagatggcacaggagggcttcagcgctgtgttcacacctgatggccccgttctgggggctgtggggagcttcacctggtctggaggtgccttcctgtaccccccaaatatgagccctaccttcatcaacatgtctcaggagaatgtggacatgagggactcttacctgggttactccaccgagctggccctctggaaaggggtgcagagcctggtcctgggggccccccgctaccagcacaccgggaaggctgtcatcttcacccaggtgtccaggcaatggaggatgaaggccgaagtcacggggactcagatcggctcctacttcggggcctccctctgctccgtggacgtagacagcgacggcagcaccgacctggtcctcatcggggccccccattactacgagcagacccgagggggccaggtgtctgtgtgtcccttgcccagggggtggagaaggtggtggtgtgatgctgttctctacggggagcagggccacccctggggtcgctttggggcggctctgacagtgctgggggatgtgaatggggacaagctgacagacgtggtcatcggggccccaggagaggaggagaaccggggtgctgtctacctgtttcacggagtcttgggacccagcatcagcccctcccacagccagcggatcgcgggctcccagctctcctccaggctgcagtattttgggcaggcactgagcgggggtcaagacctcacccaggatggactggtggacctggctgtgggggcccggggccaggtgctcctgctcaggaccagacctgtgctctgggtgggggtgagcatgcagttcatacctgccgagatccccaggtctgcgtttgagtgtcgggagcaggtggtctctgagcagaccctggtacagtccaacatctgcctttacattgacaaacgttctaagaacctgcttgggagccgtgacctccaaagctctgtgaccttggacctggccctcgaccctggccgcctgagtccccgtgccaccttccaggaaacaaagaaccggagtctgagccgagtccgagtcctcgggctgaaggcacactgtgaaaacttcaacctgctgctcccgagctgcgtggaggactctgtgacccccattaccttgcgtctgaacttcacgctggtgggcaagcccctccttgccttcagaaacctgcggcctatgctggccgccgatgctcagagatacttcacggcctccctaccctttgagaagaactgtggagccgaccatatctgccaggacaatctcggcatctccttcagcttcccaggcttgaagtccctgctggtggggagtaacctggagctgaacgcagaagtgatggtgtggaatgacggggaagactcctacggaaccaccatcaccttctcccaccccgcaggactgtcctaccgctacgtggcagagggccagaaacaagggcagctgcgttccctgcacctgacatgtgacagcgccccagttgggagccagggcacctggagcaccagctgcagaatcaaccacctcatcttccgtggcggcgcccagatcaccttcttggctacctttgacgtctcccccaaggctgtcctgggagaccggctgcttctgacagccaatgtgagcagtgagaacaacactcccaggaccagcaagaccaccttccagctggagctcccggtgaagtatgctgtctacactgtggttagcagccacgaacaattcaccaaatacctcaacttctcagagtctgaggagaaggaaagccatgtggccatgcacagataccaggtcaataacctgggacagagggacctgcctgtcagcatcaacttctgggtgcctgtggagctgaaccaggaggctgtgtggatggatgtggaggtctcccacccccagaacccatcccttcggtgctcctcagagaaaatcgcacccccagcatctgacttcctggcgcacattcagaagaatcccgtgctggactgctccattgctggctgcctgcggttccgctgtgacgtcccctccttcagcgtccaggaggagctggatttcaccctgaagggcaacctcagctttggctgggtccgccagatattgcagaagaaggtgtcggtcgtgagtgtggctgaaattacgttcgacacatccgtgtactcccagcttccaggacaggaggcatttatgagagctcagacgacaacggtgctggagaagtacaaggtccacaaccccacccccctcatcgtaggcagctccattgggggtctgttgctgctggcactcatcacagcggtactgtacaaagttggcttcttcaagcgtcagtacaaggaaatgatggaggaggcaaatggacaaattgccccagaaaacgggacacagacccccagcccgcccagtgagaaatga

SEQ ID NO: 80 - DNA, 2397 bp, Homo sapiens
atgaatttacaaccaattttctggattggactgatcagttcagtttgctgtgtgtttgctcaaacagatgaaaatagatgtttaaaagcaaatgccaaatcatgtggagaatgtatacaagcagggccaaattgtgggtggtgcacaaattcaacatttttacaggaaggaatgcctacttctgcacgatgtgatgatttagaagccttaaaaaagaagggttgccctccagatgacatagaaaatcccagaggctccaaagatataaagaaaaataaaaatgtaaccaaccgtagcaaaggaacagcagagaagctcaagccagaggatattactcagatccaaccacagcagttggttttgcgattaagatcaggggagccacagacatttacattaaaattcaagagagctgaagactatcccattgacctctactaccttatggacctgtcttactcaatgaaagacgatttggagaatgtaaaaagtcttggaacagatctgatgaatgaaatgaggaggattacttcggacttcagaattggatttggctcatttgtggaaaagactgtgatgccttacattagcacaacaccagctaagctcaggaacccttgcacaagtgaacagaactgcaccagcccatttagctacaaaaatgtgctcagtcttactaataaaggagaagtatttaatgaacttgttggaaaacagcgcatatctggaaatttggattctccagaaggtggtttcgatgccatcatgcaagttgcagtttgtggatcactgattggctggaggaatgttacacggctgctggtgttttccacagatgccgggtttcactttgctggagatgggaaacttggtggcattgttttaccaaatgatggacaatgtcacctggaaaataatatgtacacaatgagccattattatgattatccttctattgctcaccttgtccagaaactgagtgaaaataatattcagacaatttttgcagttactgaagaatttcagcctgtttacaaggagctgaaaaacttgatccctaagtcagcagtaggaacattatctgcaaattctagcaatgtaattcagttgatcattgatgcatacaattccctttcctcagaagtcattttggaaaacggcaaattgtcagaaggcgtaacaataagttacaaatcttactgcaagaacggggtgaatggaacaggggaaaatggaagaaaatgttccaatatttccattggagatgaggttcaatttgaaattagcataacttcaaataagtgtccaaaaaaggattctgacagctttaaaattaggcctctgggctttacggaggaagtagaggttattcttcagtacatctgtgaatgtgaatgccaaagcgaaggcatccctgaaagtcccaagtgtcatgaaggaaatgggacatttgagtgtggcgcgtgcaggtgcaatgaagggcgtgttggtagacattgtgaatgcagcacagatgaagttaacagtgaagacatggatgcttactgcaggaaagaaaacagttcagaaatctgcagtaacaatggagagtgcgtctgcggacagtgtgtttgtaggaagagggataatacaaatgaaatttattctggcaaattctgcgagtgtgataatttcaactgtgatagatccaatggcttaatttgtggaggaaatggtgtttgcaagtgtcgtgtgtgtgagtgcaaccccaactacactggcagtgcatgtgactgttctttggatactagtacttgtgaagccagcaacggacagatctgcaatggccggggcatctgcgagtgtggtgtctgtaagtgtacagatccgaagtttcaagggcaaacgtgtgagatgtgtcagacctgccttggtgtctgtgctgagcataaagaatgtgttcagtgcagagccttcaataaaggagaaaagaaagacacatgcacacaggaatgttcctattttaacattaccaaggtagaaagtcgggacaaattaccccagccggtccaacctgatcctgtgtcccattgtaaggagaaggatgttgacgactgttggttctattttacgtattcagtgaatgggaacaacgaggtcatggttcatgttgtggagaatccagagtgtcccactggtccagacatcattccaattgtagctggtgtggttgctggaattgttcttattggccttgcattactgctgatatggaagcttttaatgataattcatgacagaagggagtttgctaaatttgaaaaggagaaaatgaatgccaaatgggacacgggtgaaaatcctatttataagagtgccgtaacaactgtggtcaatccgaagtatgagggaaaatga

SEQ ID NO: 81 - DNA, 1476 bp, Homo sapiens
atgagtcttcttatgattagtgagaatgtaaaattggctcgtgaatatgcattgctgggaaactatgactctgcgatggtctattatcagggagttcttgaccaaatgaacaagtatctgtactcagtcaaagatacatacctccagcagaaatggcaacaggtttggcaggaaataaatgtggaagctaaacatgttaaagatatcatgaaaacactagagagctttaaactggacagcactcccttgaaagcggcacagcatgaccttccagcttctgagggagaagtctggtccatgcctgtacctgttgaacgaagaccctcaccaggacctagaaaacgccaatcttctcagtacagtgaccctaaatcacatggtaatcgtccaagtacaactgtcagagttcaccgttcatctgcacagaatgttcacaatgacagagggaaagctgttcgttgtcgtgaaaagaaagaacagaataaaggaagagaggaaaagaacaaatcacctgctgcagtaacagaaccagagacaaataaatttgatagtaccggatatgataaagacttagtagaagctttggaaagagatataatttcccagaatcccaatgttcgatgggatgatatcgctgatttagtagaagctaaaaagttgcttaaggaagccgtagtgttaccaatgtggatgcccgaattctttaagggcattaggagaccatggaaaggagtactgatggtcggcccacctggcacggggaagacgctccttgctaaagcagtagctacagaatgcaagacaacattcttcaatgtctcttcatcaactttgacttccaaatacagaggagaatctgagaagcttgttcgtcttctgtttgaaatggctcgattttattctccagccaccatatttattgatgagatagactccatctgtagtcgccgagggacttctgaagaacatgaagcaagcagaagggtgaaagcggagctgctggttcagatggatggtgttggaggtacttctgaaaatgatgacccttccaaaatggttatggttctggcagctactaattttccctgggatatagatgaggctttaagacgacgccttgagaaacgaatctatattcctttgccgtcagcaaaaggcagggaggagctattacgaataagtctacgtgagttggaattggctgatgatgttgaccttgcaagtatagcagaaaacatggaaggttattcaggtgcggacattaccaacgtgtgcagggatgcgtccttgatggcaatgagaaggcgcattgaaggtttgactccagaggaaatccgaaatctttccaaagaagaaatgcacatgcctacaactatggaggatttcgagatggctttaaaaaaggtttctaagtcagtgtctgctgcagacattgaaagatacgagaaatggatatttgagtttggatcatgctaa

SEQ ID NO: 82 - DNA, 1068 bp, Homo sapiens
atggcgctgagtgaacccatcctgccgtccttctccactttcgccagcccgtgccgcgagcgcggcctgcaggagcgctggccgcgcgccgaacccgagtccggcggcaccgacgacgacctcaacagcgtgctggacttcatcctgtccatggggctggatggcctgggcgccgaggccgccccggagccgccgccgccgcccccgccgcctgcgttctattaccccgaacccggcgcgcccccgccctacagcgcccccgcgggtggcctggtgtctgagctgctgcgacccgagctggatgcgccgctggggcccgcactgcacggccgctttctgctggcgccgcccggccgcctggtcaaggccgagccccctgaagcggacggcggcggcggctacggctgcgcccccgggctgacccgtggaccgcgcggcctcaagcgcgagggcgccccgggcccggcggcttcgtgcatgcgaggtcccgggggccgccccccgccgccgcccgacacaccgccgctcagccccgacggccccgcgcgcctgcccgcgcccggtccgcgcgcctccttcccgccgcctttcggtggccctggtttcggcgcgcccgggcccggcctgcattacgcgccgcctgcgcccccagccttcggtctcttcgacgacgcggccgccgccgcggcagccctgggcctggcgccccccgccgcccgcggtctcctcacgccgcctgcgtccccgctggagctgctggaggccaagccaaagcgcggccgccgctcttggccccgcaaacgcaccgccactcacacctgcagctacgcgggctgcggcaagacctacaccaagagttcgcatctgaaggcgcatctgcgcacgcacacaggtgagaagccctaccactgcaactgggacggctgcggctggaagtttgcgcgctcagacgagctcacgcgccactaccgaaagcacacgggccaccggccattccagtgccatctgtgcgatcgtgccttctcgcgctccgatcacctggcgctgcacatgaaacggcacatgtag

SEQ ID NO: 83 - DNA, 696 bp, Homo sapiens
atgcaagatgaagaaagatacatgacattgaatgtacagtcaaagaaaaggagttctgcccaaacatctcaacttacatttaaagattattcagtgacgttgcactggtataaaatcttactgggaatatctggaaccgtgaatggtattctcactttgactttgatctccttgatcctgttggtttctcagggagtattgctaaaatgccaaaaaggaagttgttcaaatgccactcagtatgaggacactggagatctaaaagtgaataatggcacaagaagaaatataagtaataaggacctttgtgcttcgagatctgcagaccagacagtactatgccaatcagaatggctcaaataccaagggaagtgttattggttctctaatgagatgaaaagctggagtgacagttatgtgtattgtttggaaagaaaatctcatctactaatcatacatgaccaacttgaaatggcttttatacagaaaaacctaagacaattaaactacgtatggattgggcttaactttacctccttgaaaatgacatggacttgggtggatggttctccaatagattcaaagatattcttcataaagggaccagctaaagaaaacagctgtgctgccattaaggaaagcaaaattttctctgaaacctgcagcagtgttttcaaatggatttgtcagtattag

SEQ ID NO: 84 - DNA, 1254 bp, Homo sapiens
atggcggcccccggcagcgcccggcgacccctgctgctgctactgctgttgctgctgctcggcctcatgcattgtgcgtcagcagcaatgtttatggtgaaaaatggcaacgggaccgcgtgcataatggccaacttctctgctgccttctcagtgaactacgacaccaagagtggccctaagaacatgacctttgacctgccatcagatgccacagtggtgctcaaccgcagctcctgtggaaaagagaacacttctgaccccagtctcgtgattgcttttggaagaggacatacactcactctcaatttcacgagaaatgcaacacgttacagcgtccagctcatgagttttgtttataacttgtcagacacacaccttttccccaatgcgagctccaaagaaatcaagactgtggaatctataactgacatcagggcagatatagataaaaaatacagatgtgttagtggcacccaggtccacatgaacaacgtgaccgtaacgctccatgatgccaccatccaggcgtacctttccaacagcagcttcagccggggagagacacgctgtgaacaagacaggccttccccaaccacagcgccccctgcgccacccagcccctcgccctcacccgtgcccaagagcccctctgtggacaagtacaacgtgagcggcaccaacgggacctgcctgctggccagcatggggctgcagctgaacctcacctatgagaggaaggacaacacgacggtgacaaggcttctcaacatcaaccccaacaagacctcggccagcgggagctgcggcgcccacctggtgactctggagctgcacagcgagggcaccaccgtcctgctcttccagttcgggatgaatgcaagttctagccggtttttcctacaaggaatccagttgaatacaattcttcctgacgccagagaccctgcctttaaagctgccaacggctccctgcgagcgctgcaggccacagtcggcaattcctacaagtgcaacgcggaggagcacgtccgtgtcacgaaggcgttttcagtcaatatattcaaagtgtgggtccaggctttcaaggtggaaggtggccagtttggctctgtggaggagtgtctgctggacgagaacagcatgctgatccccatcgctgtgggtggtgccctggcggggctggtcctcatcgtcctcatcgcctacctcgtcggcaggaagaggagtcacgcaggctaccagactatctag

SEQ ID NO: 85 - DNA, 753 bp, Homo sapiens
atgacaccaggtcgctgctgtcttgcggctgacattcaggtagagacgttcatcttcactgacggggaagatgaggccctggccaggcacacgggcaacgtggtcatcacaaactgctcggccgcccacagccgccaggcgctgtcctgcaagatggccgtggagtatgaccgcttcatcgagtccggcaggaagtggttctgccacgtggacgatgacaactacgtcaacctgcgggccctgctgcggctgctggccagctacccgcacacgcgggacgtctacgtcggcaagcccagcctggacaggcccatccaggccatggagcgggtcagcgagaacaaggtgcgtcctgtccacttctggtttgccacgggcggcgctggcttctgcatcagccgtgggctggctctgaagatgagcccgtgggccagcgggggtcacttcatgaatacggctgagcggatccggctgcctgatgactgcaccatcggctacatcgtggaggccctgctgggtgtgcccctcatccgcagcggcctcttccactcccacctggagaacctgcagcaggtgcccacctcggagctccacgagcaggtgacgctgagctacggtatgtttgaaaacaagcggaacgccgtccacgtgaaggggcccttctcggtggaggccgacccatccaggttccgctccatccactgccacctgtacccggacacaccctggtgtccccgcactgccatcttctag

SEQ ID NO: 86 - DNA, 687 bp, Homo sapiens
atgtgtcatgtcattgtcacctgtcgctcgatgctctggaccttgctgagtattgtggtggcttttgccgagctcattgccttcatgagtgcagactggctgatcgggaaagcgaggagccgcggcggcgtggagccggcgggcccgggcgggggctccccggagccctaccaccccaccctgggcatctacgcccgctgcatccggaacccaggggtgcagcacttccagcgggacacgctgtgcgggccctacgccgagagcttcggcgagatcgccagcggcttctggcaggccacagctattttcctggctgtgggaatctttattctctgcatggtggccttggtgtccgtcttcaccatgtgtgtacagagcatcatgaagaaaagcatcttcaatgtctgtgggctgttgcaaggaattgcaggtctattccttatcctcggtttgatactctaccctgctggctggggttgccagaaggccatagactactgtggacattatgcatctgcctacaaacctggagactgctccttgggctgggccttttataccgccattgggggcacagtcctcactttcatctgtgctgtcttctctgcacaagcagaaattgcaacctctagtgacaaagtacaggaagaaattgaagaggggaaaaatctgatctgcctcctttag

SEQ ID NO: 87 - DNA, 1899 bp, Homo sapiens
atgacgcccgccctcacagccctgctctgccttgggctgagtctgggccccaggacccgcgtgcaggcagggcccttccccaaacccaccctctgggctgagccaggctctgtgatcagctgggggagccccgtgaccatctggtgtcaggggagcctggaggcccaggagtaccaactggataaagagggaagcccagagcccttggacagaaataacccactggaacccaagaacaaggccagattctccatcccatccatgacacagcaccatgcagggagataccgctgccactattacagctctgcaggctggtcagagcccagcgaccccctggagctggtgatgacaggattctacaacaaacccaccctctcagccctgcccagccctgtggtggcctcaggggggaatatgaccctccgatgtggctcacagaagggatatcaccattttgttctgatgaaggaaggagaacaccagctcccccggaccctggactcacagcagctccacagtggggggttccaggccctgttccctgtgggccccgtgacccccagccacaggtggaggttcacatgctattactattatacaaacaccccccgggtgtggtcccaccccagtgaccccctggagattctgccctcaggcgtgtctaggaagccctccctcctgaccctgcagggccctgtcctggcccctgggcagagcctgaccctccagtgtggctctgatgtcggctacgacagatttgttctgtataaggagggggaacgtgacttcctccagcgccctggccagcagccccaggctgggctctcccaggccaacttcaccctgggccctgtgagcccctcccacgggggccagtacaggtgctatggtgcacacaacctctcctccgagtggtcggcccccagcgaccccctgaacatcctgatggcaggacagatctatgacaccgtctccctgtcagcacagccgggccccacagtggcctcaggagagaacgtgaccctgctgtgtcagtcacggggttattttgacactttccttctgaccaaagaaggggcagcccatcccccactgcgtctgagatcaatgtacggagctcataagtaccaggctgaattccccatgagtcctgtgacctcagcccacgcggggacctacaggtgctacggctcatacagctccaacccccacctgctgtctttccccagtgagcccctggaactcatggtctcaggacactctggaggctccagcctcccacccacagggccgccctccacacctggtctgggaagatacctggaggttttgattggggtctcggtggccttcgtcctgctgctcttcctcctcctcttcctcctcctccgacgtcagcgtcacagcaaacacaggacatctgaccagagaaagactgatttccagcgtcctgcaggggctgcggagacagagcccaaggacaggggcctgctgaggaggtccagcccagctgctgacgtccaggaagaaaacctctatgctgccgtgaaggacacacagtctgaggacagggtggagctggacagtcagcagagcccacacgatgaagacccccaggcagtgacgtatgccccggtgaaacactccagtcctaggagagaaatggcctctcctccctcctcactgtctggggaattcctggacacaaaggacagacaggtggaagaggacaggcagatggacactgaggctgctgcatctgaagcctcccaggatgtgacctacgcccagctgcacagcttgacccttagacggaaggcaactgagcctcctccatcccaggaaggggaacctccagctgagcccagcatctacgccactctggccatccactag

SEQ ID NO: 88 - DNA, 1836 bp, Homo sapiens
atgcccgagatagtggatacctgttcgttggcctctccggcttccgtctgccggaccaagcacctgcacctgcgctgcagcgtcgactttactcgccggacgctgaccgggactgctgctctcacggtccagtctcaggaggacaatctgcgcagcctggttttggatacaaaggaccttacaatagaaaaagtagtgatcaatggacaagaagtcaaatatgctcttggagaaagacaaagttacaagggatcgccaatggaaatctctcttcctatcgctttgagcaaaaatcaagaaattgttatagaaatttcttttgagacctctccaaaatcttctgctctccagtggctcactcctgaacagacttctgggaaggaacacccatatctctttagtcagtgccaggccatccactgcagagcaatccttccttgtcaggacactccttctgtgaaattaacctatactgcagaggtgtctgtccctaaagaactggtggcacttatgagtgctattcgtgatggagaaacacctgacccagaagacccaagcaggaaaatatacaaattcatccaaaaagttccaataccctgctacctgattgctttagttgttggagctttagaaagcaggcaaattggcccaagaactttggtgtggtctgagaaagagcaggtggaaaagtctgcttatgagttttctgagactgaatctatgcttaaaatagcagaagatctgggaggaccgtatgtatggggacagtatgacctattggtcctgccaccatccttcccttatggtggcatggagaatccttgccttacttttgtaactcctactctactggcaggcgacaagtcactctccaatgtcattgcacatgaaatatctcatagctggacagggaatctagtgaccaacaaaacttgggatcacttttggttaaatgagggacatactgtgtacttggaacgccacatttgcggacgattgtttggtgaaaagttcagacattttaatgctctgggaggatggggagaactacagaattcggtaaagacatttggggagacacatcctttcaccaaacttgtggttgatctgacagatatagaccctgatgtagcttattcttcagttccctatgagaagggctttgctttacttttttaccttgaacaactgcttggaggaccagagattttcctaggattcttaaaagcttatgttgagaagttttcctataagagcataactactgatgactggaaggatttcctgtattcctattttaaagataaggttgatgttctcaatcaagttgattggaatgcctggctctactctcctggactgcctcccataaagcccaattatgatatgactctgacaaatgcttgtattgccttaagtcaaagatggattactgccaaagaagatgatttaaattcattcaatgccacagacctgaaggatctctcttctcatcaattgaatgagtttttagcacagacgctccagagggcacctcttccattggggcacataaagcgaatgcaagaggtgtacaacttcaatgccattaacaattctgaaatacgattcagatggctgcggctctgcattcaatccaagtgggaggacgcaattcctttggcgctaaagatggcaactgaacaaggaagaatgaagtttacccggcccttattcaaggatcttgctgcctttgacaaatcccatgatcaagctgtccgaacctaccaagagcacaaagcaagcatgcatcccgtgactgcaatgctggtggggaaagacttaaaagtggattaa

SEQ ID NO: 89 - DNA, 2133 bp, Homo sapiens
atgaaacttgtcttcctcgtcctgctgttcctcggggccctcggactgtgtctggctggccgtaggaggagtgttcagtggtgcgccgtatcccaacccgaggccacaaaatgcttccaatggcaaaggaatatgagaaaagtgcgtggccctcctgtcagctgcataaagagagactcccccatccagtgtatccaggccattgcggaaaacagggccgatgctgtgacccttgatggtggtttcatatacgaggcaggcctggccccctacaaactgcgacctgtagcggcggaagtctacgggaccgaaagacagccacgaactcactattatgccgtggctgtggtgaagaagggcggcagctttcagctgaacgaactgcaaggtctgaagtcctgccacacaggccttcgcaggaccgctggatggaatgtccctatagggacacttcgtccattcttgaattggacgggtccacctgagcccattgaggcagctgtggccaggttcttctcagccagctgtgttcccggtgcagataaaggacagttccccaacctgtgtcgcctgtgtgcggggacaggggaaaacaaatgtgccttctcctcccaggaaccgtacttcagctactctggtgccttcaagtgtctgagagacggggctggagacgtggcttttatcagagagagcacagtgtttgaggacctgtcagacgaggctgaaagggacgagtatgagttactctgcccagacaacactcggaagccagtggacaagttcaaagactgccatctggcccgggtcccttctcatgccgttgtggcacgaagtgtgaatggcaaggaggatgccatctggaatcttctccgccaggcacaggaaaagtttggaaaggacaagtcaccgaaattccagctctttggctcccctagtgggcagaaagatctgctgttcaaggactctgccattgggttttcgagggtgcccccgaggatagattctgggctgtaccttggctccggctacttcactgccatccagaacttgaggaaaagtgaggaggaagtggctgcccggcgtgcgcgggtcgtgtggtgtgcggtgggcgagcaggagctgcgcaagtgtaaccagtggagtggcttgagcgaaggcagcgtgacctgctcctcggcctccaccacagaggactgcatcgccctggtgctgaaaggagaagctgatgccatgagtttggatggaggatatgtgtacactgcaggcaaatgtggtttggtgcctgtcctggcagagaactacaaatcccaacaaagcagtgaccctgatcctaactgtgtggatagacctgtggaaggatatcttgctgtggcggtggttaggagatcagacactagccttacctggaactctgtgaaaggcaagaagtcctgccacaccgccgtggacaggactgcaggctggaatatccccatgggcctgctcttcaaccagacgggctcctgcaaatttgatgaatatttcagtcaaagctgtgcccctgggtctgacccgagatctaatctctgtgctctgtgtattggcgacgagcagggtgagaataagtgcgtgcccaacagcaacgagagatactacggctacactggggctttccggtgcctggctgagaatgctggagacgttgcatttgtgaaagatgtcactgtcttgcagaacactgatggaaataacaatgaggcatgggctaaggatttgaagctggcagactttgcgctgctgtgcctcgatggcaaacggaagcctgtgactgaggctagaagctgccatcttgccatggccccgaatcatgccgtggtgtctcggatggataaggtggaacgcctgaaacaggtgttgctccaccaacaggctaaatttgggagaaatggatctgactgcccggacaagttttgcttattccagtctgaaaccaaaaaccttctgttcaatgacaacactgagtgtctggccagactccatggcaaaacaacatatgaaaaatatttgggaccacagtatgtcgcaggcattactaatctgaaaaagtgctcaacctcccccctcctggaagcctgtgaattcctcaggaagtaa

SEQ ID NO: 90 - DNA, 2463 bp, Homo sapiens
atggcgctgctgcgggatgtgtcgctgcaggacccgcgggaccgcttcgagctgctgcagcgcgtgggggccgggacctatggcgacgtctacaaggcccgcgacacggtcacgtccgaactggccgccgtgaagatagtcaagctagacccaggggacgacatcagctccctccagcaggaaatcaccatcctgcgtgagtgccgccaccccaatgtggtggcctacattggcagctacctcaggaatgaccgcttgtggatctgcatggagttctgcggagggggctccctgcaggagatttaccatgccactgggcccctggaggagcggcagattgcctacgtctgccgagaggcactgaaggggctccaccacctgcattctcaggggaagatccacagagacatcaagggagccaaccttctcctcactctccagggagatgtcaaactggctgactttggggtgtcaggcgagctgacagcgtctgtggccaagaggaggtctttcattgggactccctactggatggctcccgaggtggctgctgtggagcgcaaaggtggctacaatgagctatgtgacgtctgggccctgggcatcactgccattgagctgggcgagctgcagccccctctgttccacctgcaccccatgagggccctgatgctcatgtcgaagagcagcttccagccgcccaaactgagagataagactcgctggacccagaatttccaccactttctcaaactggccctgaccaagaatcctaagaagaggccgacagcagagaagctcctgcagcacccgttcacgactcagcagctccctcgggccctcctcacacagctgctggacaaagccagtgaccctcatctggggaccccctcccctgaggactgtgagctggagacctatgacatgtttccagacaccattcactcccgggggcagcacggcccagccgagaggaccccctcggagatccagtttcaccaggtgaaatttggcgccccacgcaggaaggaaactgacccactgaatgagccgtgggaggaagagtggacactactgggaaaggaagagttgagtgggagcctgctgcagtcggtccaggaggccctggaggaaaggagtctgactattcggtcagcctcagaattccaggagctggactccccagacgataccatgggaaccatcaagcgggccccgttcctagggccactccccactgaccctccagcagaggagcctctgtccagtcccccaggaaccctgcccccacctccttcaggccccaacagctccccactgctgcccacggcctgggccaccatgaagcagcgggaggatcctgagaggtcatcctgccacgggctccccccaactcccaaggtgcatatgggcgcctgcttctccaaggtcttcaatggctgccccctgcggatccacgctgctgtcacctggattcaccctgttactcgggaccagttcctggtggtaggggccgaggaaggcatctacacactcaacctgcatgaactgcatgaggatacgctggagaagctgatttcacatcgctgctcctggctctactgcgtgaacaacgtgctgctgtcactctcagggaaatccacgcacatctgggcccatgacctcccaggcctgtttgagcagcggaggctacagcaacaggttcccctctccatccccaccaaccgcctcacccagcgcatcatccccaggcgctttgctctgtccaccaagattcctgacaccaaaggctgcttgcagtgtcgtgtggtgcggaacccctacacgggtgccaccttcctgctggccgccctgcccaccagcctgctcctgctgcagtggtatgagccgctgcagaagtttctgctgctgaagaacttctccagccctctgcccagcccagctgggatgctggagccgctggtgctggatgggaaggagctgccgcaggtgtgtgttggggccgaggggcctgaggggcccggctgccgcgtcctgttccatgtcctgcccctggaggctggcctgacgcccgacatcctcatcccacctgaggggatcccaggctcggcccagcaggtgatccaggtggacagggacacaatcctagtcagctttgaacgctgtgtgaggattgtcaacatgcagggcgagcccacggccacactggcacctgagctgacctttgatttccccatcgagactgtggtgtgcctgcaggacagtgtgctggccttctggagccatgggatgcaaggccgaagcctggataccaatgaggtgacccaggagatcacagatgaaacaaggatcttccgagtgcttggggcccacagagacatcatcctggagagcattcccactgacaacccagaggcgcacagcaacctctacatcctcacgggccaccagagcacctactaa

SEQ ID NO: 91 - DNA, 1083 bp, Homo sapiens
atgtctcaggagaggcccacgttctaccggcaggagctgaacaagacaatctgggaggtgcccgagcgttaccagaacctgtctccagtgggctctggcgcctatggctctgtgtgtgctgcttttgacacaaaaacggggttacgtgtggcagtgaagaagctctccagaccatttcagtccatcattcatgcgaaaagaacctacagagaactgcggttacttaaacatatgaaacatgaaaatgtgattggtctgttggacgtttttacacctgcaaggtctctggaggaattcaatgatgtgtatctggtgacccatctcatgggggcagatctgaacaacattgtgaaatgtcagaagcttacagatgaccatgttcagttccttatctaccaaattctccgaggtctaaagtatatacattcagctgacataattcacagggacctaaaacctagtaatctagctgtgaatgaagactgtgagctgaagattctggattttggactggctcggcacacagatgatgaaatgacaggctacgtggccactaggtggtacagggctcctgagatcatgctgaactggatgcattacaaccagacagttgatatttggtcagtgggatgcataatggccgagctgttgactggaagaacattgtttcctggtacagaccatattaaccagcttcagcagattatgcgtctgacaggaacaccccccgcttatctcattaacaggatgccaagccatgaggcaagaaactatattcagtctttgactcagatgccgaagatgaactttgcgaatgtatttattggtgccaatcccctggctgtcgacttgctggagaagatgcttgtattggactcagataagagaattacagcggcccaagcccttgcacatgcctactttgctcagtaccacgatcctgatgatgaaccagtggccgatccttatgatcagtcctttgaaagcagggacctccttatagatgagtggaaaagcctgacctatgatgaagtcatcagctttgtgccaccaccccttgaccaagaagagatggagtcctga

SEQ ID NO: 92 - DNA, 4011 bp, Homo sapiens
atgatggagatccagatggacgagggcggcggcgtggtggtgtaccaggacgactactgctccggctcggtgatgtcggagcgggtgtcgggcctggcgggctccatctaccgcgagttcgagcgcctcatccactgctacgacgaggaggtggtcaaggagctcatgccgctggtggtgaacgtgctggagaacctagactcggtgctcagcgagaaccaggagcacgaggtggagctggagctgctgcgcgaggacaacgagcagctgctcacccagtacgagcgtgagaaggcgctgcgcaggcaggcggaggagaaattcattgagtttgaagatgctctggaacaagagaagaaagagctgcaaatccaggtggagcactacgagttccagacgcgccagctggagctgaaggccaagaactatgccgatcagatttcccggttggaggagcgggagtcggagatgaagaaggagtacaatgccctgcaccagcggcacacagagatgatacagacctacgtggagcacattgagaggtccaagatgcagcaggtcggaggaaacagccagaccgagagcagcctgccggggcggaggaaggagcgccccacctccctgaacgtgttccccctggctgacggcacggtacgtgcacagatcgggggcaagctcgtgcctgcgggggaccactggcacctgagtgacctcggccagctgcagtccagctccagctaccagtgtccacaggatgaaatgtccgagtcaggccagtcctcggcggccgccacacccagcaccacaggcaccaagtccaacacgcccacatcctccgtgccctcggccgccgtcacacccctcaacgagagcctgcagcccctgggggactatggcgtgggctccaagaacagcaagcgtgcccgggagaagcgcgacagccgcaacatggaagtacaggtcacccaggagatgcgcaacgtcagtataggcatgggcagcagtgacgagtggtctgatgttcaagacattattgactccacgccagagctggacatgtgtccagagacccgcctggaccgcacaggaagcagcccaacccagggcatcgtgaacaaagctttcggcatcaacaccgactccctgtaccatgagctgtcgacggcagggtctgaggtcatcggggatgtggacgaaggggccgacctcctaggggagttctcagtgcgcgatgatttctttggaatgggcaaagaagtggggaatctgctactggaaaactcacagcttctggaaaccaaaaacgccttgaatgtggtgaagaatgacctgattgccaaggtcgaccagctgtccggggagcaggaggtgctgaggggcgagttggaggctgctaagcaggccaaagtcaagctggaaaaccgtatcaaggagctggaagaggaactgaaaagagtgaagtccgaggccatcatcgcccgccgtgaacccaaagaagaggcggaggatgtaagcagctatctctgtacagaatcggacaaaatccccatggcccagcgccgccgcttcacgcgggtggagatggcccgtgtgctcatggagcggaaccagtacaaggagcggctgatggagctgcaggaggctgtgcggtggactgagatgatcagagcgtcccgagagcacccatccgtccaggagaagaagaagtcgaccatctggcagttcttcagccgcctcttcagctcttcctccagcccccctccggccaagcgcccctatccctcggtgaacatccactacaagtcacccaccactgccggcttcagccagcgccgcaaccatgccatgtgcccgatctcggcaggcagccggcccctggaattcttccctgacgacgactgcacgtcctccgcccgtcgagagcagaagcgcgagcagtaccgccaggtgcgtgagcacgtgcgtaacgacgacggccgtctgcaggcctgcggctggagcctgcccgccaagtacaagcagctgagtcccaacgggggccaggaggacacgcggatgaagaacgtgccggtgccggtgtactgccgccctctggtggagaaggaccccaccatgaagctgtggtgtgccgcgggcgtcaacctgagcgggtggaggcccaatgaggacgacgctgggaatggagtcaagccagcgccaggccgcgatcccctgacctgcgaccgcgaaggagacggcgagcccaagagcgcccacacgtctcccgagaagaagaaggccaaggagctccctgaaatggacgccacctccagccgggtgtggatcctgaccagcaccctgaccaccagcaaggtggtgatcatcgacgccaaccagccgggcacggtggtggaccagttcaccgtctgcaacgcgcacgtgctgtgcatctccagcatccccgcggccagcgacagcgactaccctcccggggagatgttcctggacagcgacgtgaacccagaggacccgggcgcagatggcgtgctggccggtatcaccctggtgggctgtgccacccgctgcaacgtgccgcggagcaactgctcctcccgaggggacaccccagtgctagacaaggggcagggggaggtggccaccatcgccaacgggaaggtcaacccgtcccagtccacagaggaggccacagaggccacggaggtgccagaccctgggcccagcgagccagagacagccacattgcggcccgggcctctcacagagcacgtcttcactgacccagccccgaccccgtcctctggcccccagcctggcagcgagaacgggccagagcctgacagcagcagcacacggccagagccagagcccagcggggaccccacgggagcaggcagcagtgctgcacccaccatgtggctgggagcccagaacggctggctctatgtgcactcggctgtggccaactggaagaagtgcctgcactccatcaagctgaaggattctgtgctgagcctggtgcatgtcaaaggccgtgtgctggtggctctggcggacgggaccctggccatcttccaccgtggtgaagatggccagtgggatctgagcaactatcacctaatggacctgggccacccgcaccactccatccgctgcatggctgttgtgtacgaccgcgtgtggtgtggctacaagaacaaggtgcacgtcatccagcccaagaccatgcagatagagaagtcatttgacgcccacccgcggcgggagagccaggtgcggcagctggcgtggatcggcgatggcgtatgggtgtccatccgcctggactccaccctgaggctctaccatgcacacacgcaccagcatctacaggacgtggacattgagccctacgtcagcaagatgctaggcactggcaagctgggtttctccttcgtacgcatcacggccctgcttgtcgcgggcagccggctctgggtgggcaccggcaacggagtggtcatctccatccccctgacagagactgtggtcctgcaccgaggccagctcctggggctccgagccaataagacatcccccacctctggggagggcgcccgtcccgggggcatcatccacgtgtatggcgatgacagcagtgacagggcggccagcagcttcatcccctactgctccatggcccaggcccagctatgcttccatgggcaccgcgatgccgtgaagttctttgtctcggtgccagggaacgtgctggccaccctgaatgggagtgtgctggacagcccagccgagggccctgggccagctgcccctgcctcggaggtcgagggccagaagctgcggaacgtgctggtgctgagcggcggggagggctacatcgacttccgcattggagacggagaggacgacgagacggaggagggcgcaggggacatgagccaggtgaagcccgtgctgtccaaggcagagcgcagtcacatcatcgtgtggcaggtgtcctacacccccgagtga

SEQ ID NO: 93 - DNA, 3000 bp, Homo sapiens
atggagccccgggctgccgcggcgggcgagccagagccgccggcggcgtcctcctccttccaggcccggctctggaagaacctgcagctgggggtgggcaggagcaagggcggcgggggcgggcgcgctgggggtccagagcgccgcactgcggacaccccgtcgccctccccgccacccccggtgggcacagggaatgcaccggccagggggagtggtgcaggcagcaggtggagcggcttcaagaagcggaagcaagtgctggaccgagtcttctcctcctcgcagcccaacctgtgctgctcgtcgccggagcccctggagcccggcggcgccggcagagccgagcaggggtccacgctacgccgccggatccgcgagcatttgctccccgccgtaaaggggcccgcggcggcctcgggagcagcgggagggacgcctcctggcggacgctcccccgactcagctccttcctcttcctccgcctcatcctccctgtcctcctcgccccagcctcccccgaggggggaccgcgcccgagatgagggtgcacggcgtcagggccccggggcgcacttgtgccaccagaagagctcctctctgccgggcaccgcctgcctggagcagctgctggagccgccgcctcctcccgcagagccggcgcggagtcccgcggagtctcgggccccggagacgggcgaggagcacggcagcagccagaaaataataaacactgctggaaccagtaatgcagaagtccccttggctgatcccggaatgtaccagctggacattacattaagaaggggtcaaagtttagctgctcgagatcgaggagggacgagtgatccatatgtgaagtttaaaatcggaggaaaagaagtttttagaagtaagataatacacaagaacctcaaccctgtgtgggaagaaaaagcttgtattctggttgatcatcttagggagccattgtatataaaggtatttgactatgattttggactacaggatgactttatgggctcagcctttctggatctgacacaattggagttaaacaggcccacagatgtgacccttactctgaaagatcctcattatcctgaccatgatcttggaatcattttgctctcagtcatccttacccctaaagaaggagagtccagggatgtgacaatgctaatgaggaagagttggaaaagatcaagtaaggaactttcagaaaatgaagtggttggatcttatttctctgtgaagtctctcttttggaggacgtgcggcaggccagctcttcctgtcctgggcttctgcagagcagagcttcagaatccttattgcaaaaatgtacaatttcagacccaaagtttacgcctatcagacctacacagaaaatcgcatctttggagaggaatagtcagcatcaccttgattgaagggagagacctcaaggccatggattccaacgggttgagcgatccctacgtgaagttccggcttgggcatcagaagtacaagagcaagattatgccaaaaacgttgaatcctcagtggagggaacaatttgattttcacctttatgaagaaagaggaggagtcattgatatcactgcatgggacaaagatgctgggaaaagggatgatttcattggcaggtgccaggtcgacctgtcagccctcagtagggaacagacgcacaagctggagttgcagctggaagagggtgagggacacctggtgctgctggtcactctgacagcatcagccacagtcagcatctctgacctgtctgtcaactccctggaggaccagaaggaacgagaggagatattaaagagatatagcccattgaggatatttcacaacctgaaagatgtgggatttctccaggtgaaagtcatcagagcggaagggttaatggctgccgacgtcactggaaaaagtgacccattttgtgtggtagaactgaacaacgatagactgctaacacatactgtctacaaaaatctcaatcctgagtggaataaagtcttcacgttcaacattaaagatatccattcagttcttgaagtgacagtttatgatgaagatcgggatcgaagtgctgactttctgggcaaagttgctataccattgctgtctattcaaaatggtgaacagaaagcctacgtcttgaaaaacaagcagctgacagggccaacaaagggggtcatctatcttgaaatagatgtgatttttaatgctgtgaaagccagcttacgaacattaatacccaaagaacagaagtacattgaagaggaaaacagactctctaaacagctgctactaagaaactttatcagaatgaaacgttgtgtcatggtgctggtaaatgctgcatactacgttaatagttgctttgattgggattcacccccaaggagtctcgctgcttttgtgctctttctctttgttgtctggaactttgagctctacatgataccactggttttgttgttactattgacatggaactacttcttgataatatcagggaaagataacaggcaacgtgatacagtagtggaggacatgctagaggacgaggaagaagaagatgacaaagatgacaaggacagtgaaaaaaagggatttataaataaaatctatgccatccaggaggtatgtgtcagtgtccagaacatcctagatgaagtggcttcctttggcgaaaggataaagaatactttcaactggactgtcccattcttaagctggctggccattgtagccctctgtgtgttcacagccatcctgtactgcattccgctgagatacattgtccttgtctggggcatcaataaatttacaaaaaagcttcggagtccatatgcaattgataacaatgaactacttgacttcctttccagagtcccttcagatgtacaagtggtgcaataccaagaactgaaaccagatccttctcatagcccatataaaagaaagaaaaacaatcttggctag

SEQ ID NO: 94 - DNA, 1809 bp, Homo sapiens
atgaatggcggagccgagcgcgccatgaggagcctgccgagcctgggcggcctcgccctgttgtgctgcgccgccgccgccgccgccgccgccgtcgcctcagccgcctcggcggggaatgtcaccggtggcggcggggccgcggggcaggtggacgcgtcgccgggccccgggttgcggggcgagcccagccaccccttccctagggcgacggctcccacggcccaggccccgaggaccgggcccccgcgcgccaccgtccaccgacccctggctgcgacttctccagcccagtccccggagaccacccctctttgggcgactgctggaccctcttccaccacctttcaggcgccgctcggcccctcgccgaccacccctccggcggcggaacgcacttcgaccacctctcaggcgccgaccagacccgcgccgaccaccctttcgacgaccactggcccggcgccgaccacccctgtagcgaccaccgtaccggcgcccacgactccccggaccccgacccccgatctccccagcagcagcaacagcagcgtcctccccaccccacctgccaccgaggccccctcttcgcctcctccagagtatgtatgtaactgctctgtggttggaagcctgaatgtgaatcgctgcaaccagaccacagggcagtgtgagtgtcggccaggttatcaggggcttcactgtgaaacctgcaaagagggcttttacctaaattacacttctgggctctgtcagccatgtgactgtagtccacatggagctctcagcataccgtgcaacagttctgggaaatgccagtgcaaagtgggtgtcattggctctatatgtgaccgatgccaagatggatattatggctttagtaagaatggctgcttgccctgccaatgcaataatcggtctgccagttgcgatgccctcacaggtgcttgtttaaactgccaggaaaatagcaaaggaaatcactgtgaagaatgtaaagaaggattttatcagagtcctgatgccactaaagaatgtcttcgctgcccttgttcagcagtgacatctacaggcagctgctctataaaatcgagtgaattggaacctgaatgtgaccagtgtaaagatggttacataggcccgaactgcaataaatgtgaaaatggctattacaattttgacagcatctgtagaaagtgccaatgtcacggccatgtggacccagttaaaactccaaagatttgtaagcccgagagtggtgagtgcatcaactgcctccataacaccactgggttttggtgtgagaactgcctagaaggttatgttcacgacctcgagggaaattgcatcaagaaagaagttattcttccaacacctgaaggttctaccattttggtttccaatgcctctttgaccacatcagtgcccacccctgttataaatagtacttttacccctacaaccctgcagactatcttttcagtaagcacttctgaaaacagcacttcagctttagctgatgtatcatggacccaatttaacatcatcattttgacagtcatcatcattgttgtggtgctgctaatgggatttgtgggggctgtatatatgtaccgcgagtaccaaaaccggaaactcaatgcccccttttggaccatcgagctgaaagaagacaatatcagtttcagcagctaccatgacagcattcccaatgcagatgtttcgggattgttggaagatgatggcaatgaagtggctcccaatgggcagctgaccctgacgacgcccatacataactacaaagcctaa

SEQ ID NO: 95 - DNA, 957 bp, Homo sapiens
atgagactgctggcgggctggctgtgcctgagcctggcgtccgtgtggctggcgcggaggatgtggacgctgcggagcccgctcacccgctccctgtacgtgaacatgactagcggcccgggtgggccggcggcggccgcgggcggcaggaaggagaaccaccagtggtatgtgtgcaacagagagaaattatgcgaatcactccaggctgtctttgttcagagttaccttgatcaaggaacacagatcttcttaaacaacagcattgagaaatcgggctggctatttatccaattatatcattcttttgtgtcatctgtttttagcctgtttatgtctagaacatctatcaatgggttgctaggaagaggctcaatgtttgtgttttcaccagatcagtttcagagactgcttaaaattaatccagactggaaaacccacagacttcttgatttaggtgctggagatggagaagtcacaaaaatcatgagccctcattttgaagaaatctatgccactgagctttctgaaactatgatatggcagcttcagaaaaagaaatacagagtccttggtataaatgaatggcagaatacggggttccagtatgatgtcatcagctgcctgaacttgctggaccgctgtgatcagcccctgactttgttaaaagatatcagaagtgtcttggagccaactagaggcagggtcatccttgcccttgtcctcccctttcatccctatgtggaaaacgtaggtggcaagtgggagaaaccatcagaaattttggaaatcaaaggacagaactgggaagaacaagtgaatagtctgcctgaagttttcagaaaagctggttttgttatcgaagctttcaccagactaccatacctgtgtgaaggcgacatgtataatgactactacgttctggatgacgctgtctttgttctcaaaccagtataa

SEQ ID NO: 96 - DNA, 1368 bp, Homo sapiens
atgggatggggagggggtggaggctgcaccccgcgcccacccatccaccagcagccgccggagcgccgcgtggtcaccgttgtctttctcggcctcctgctggacctcctggccttcacgctgctgctgcccctgctgcccgggctgttggagagccacggccgtgcccacgaccccctctatggctcctggcagggcggggtggactggtttgccaccgccatcgggatgccagtggagaagaggtacaacagtgtcctgttcggaggtctcattggctcggcattctctgtcctgcagtttctgtgtgcgccactcactggggccacctctgactgcttggggaggcgcccggtgatgctgctgtgcctgatgggtgtggccacctcatatgcagtctgggccacctctcggagctttgcggccttcctggcctccaggctgattgggggcatcagcaaagggaacgtcagcctctccacggccatcgttgctgacctgggctcgcctctggcccgcagtcaaggcatggcggtcattggggtggccttctcactgggcttcaccctgggccctatgctcggagcctccctgcccctggaaatggcaccctggtttgccctgctcttcgcagcctccgacctgctgttcatcttctgcttcctgccagagacgctgcccctggagaaacgggcgccctctatcgccctggggttccgtgatgcggctgatctgctcagccccctggccctgctgcgcttctcggctgtcgctcgtggccaggacccaccctctggagacaggctcagcagcctgcgccgcctgggcctagtctacttcctctacctcttcctgttctcgggcctggagtacacgctgagcttcctcacacaccagcgcttccagttcagtagcctacagcaggggaagatgtttttcctcatcggcctcaccatggccaccatccagggtgcctatgcccggcggatccaccctggcggggaagttgctgccgtgaagcgggccctcctgctgctggtgcccgccttcctcctcatcggctggggacgttctctgcccgtgctgggcctggggctgctgctctactcctttgccgccgccgttgtggtgccctgcctgtcctccgtggtcgctggctatggctcaccagggcagaagggcacggtcatgggtacactgcgcagcctaggtgctctggccagggccgcggggcccctggtggccgcttcagtgtactggctggccggggcccaggcctgcttcaccacgtggtccgggctctttttgctccccttcttcctcctgcagaagctgagttacccggcacagacgctcaaggctgagtag

SEQ ID NO: 97 - DNA, 3204 bp, Homo sapiens
atggcttcacctacctccaccaacccagcgcatgcccactttgagagcttcctgcaggcccagctgtgccaggacgtgctgagcagcttccaggagctgtgtggggccctggggctggaacccggtggggggctgccccagtaccacaagatcaaggaccagctcaactactggagcgccaagtcactgtggaccaagctggacaagcgagcaggccagcctgtctaccagcagggccgggcctgcaccagcaccaagtgcctggtggtgggtgctggaccttgcgggctgcgggtcgctgtggagctggcgctgctgggggcccgagtggtgctggtggaaaagcgcaccaagttctctcgccacaacgtgctccacctctggcccttcaccatccacgacctgcgggcactcggtgctaagaagttctacgggcgcttctgcaccggcaccctggaccacatcagcatcaggcagctccagctgcttctgctgaaggtagcattgctgctgggggtggaaattcactggggtgtcactttcactggcctccagccccctcctaggaaggggagtggctggcgtgcccagctccaacccaacccccctgcccagctggccaactatgaatttgacgtccttatctcggctgcaggaggtaaattcgtccctgaaggcttcaaagttcgagaaatgcgaggcaaactggccattggcatcacagccaactttgtgaatggacgcaccgtggaggagacacaggtgccggagatcagtggtgtagccaggatctacaaccagagcttcttccagagccttctcaaagccacaggcattgatctggagaacattgtgtactacaaggacgacacccactactttgtgatgacagccaagaagcagtgcctgctgcggctgggggtgctgcgccaggactggccagacaccaatcggctgctgggcagtgccaatgtggtgcccgaggctctgcagcgctttacccgggcagctgctgactttgccacccatggcaagctcgggaaactagagtttgcccaggatgcccatgggcagcctgatgtctctgcctttgacttcacgagcatgatgcgggcagagagttctgctcgtgtgcaagagaagcatggcgcccgcctgctgctgggactggtgggggactgcctggtggagcccttctggcccctgggcactggagtggcacggggcttcctggcagcctttgatgcagcctggatggtgaagcggtgggcagagggcgctgagtccctagaggtgttggctgagcgtgagagcctgtaccagcttctgtcacagacatccccagaaaacatgcatcgcaatgtggcccagtatgggctggacccagccacccgctaccccaacctgaacctccgggcagtgacccccaatcaggtacgagacctgtatgatgtgctagccaaggagcctgtgcagaggaacaacgacaagacagatacagggatgccagccaccgggtcggcaggcacccaggaggagctgctacgctggtgccaggagcagacagctgggtacccgggagtccacgtctccgatttgtcttcctcctgggctgatgggctagctctgtgtgccctggtgtaccggctgcagcctggcctgctggaaccctcagagctgcaggggctgggagctctggaagcaactgcttgggcactaaaggtggcagagaatgagctgggcatcacaccggtggtgtctgcacaggccgtggtagcagggagtgacccactgggcctcattgcctacctcagccacttccacagtgccttcaagagcatggcccacagcccaggccctgtcagccaggcctccccagggacctccagtgctgtattattccttagtaaacttcagaggaccctgcagcgatcccgggccaaggaaaatgcagaggatgctggtggcaagaagctgcgcttggagatggaggccgagaccccaagtactgaggtgccacctgacccagagcctggtgtacccctgacacccccatcccaacaccaggaggccggtgctggggacctgtgtgcactttgtggggaacacctctatgtcctggaacgcctctgtgtcaacggccatttcttccaccggagctgcttccgctgccatacctgtgaggccacactgtggccaggtggctacgagcagcacccaggagatggacatttctactgcctccagcacctgccccagacagaccacaaagcggaaggcagcgatagaggccctgagagtccggagctccccacaccaagtgagaatagcatgccaccaggcctctcaactcccacagcctcgcaggagggggccggtcctgttccagatcccagccagcccacccgtcggcagatccgcctctccagcccggagcgccagcggttgtcctcccttaaccttacccctgacccggaaatggagcctccacccaagcctccccgcagctgctccgccttggcccgccacgccctggagagcagctttgtgggctggggcctgccagtccagagccctcaagctcttgtggccatggagaaggaggaaaaagagagtcccttctccagtgaagaggaagaagaagatgtgcctttggactcagatgtggaacaggccctgcagacctttgccaagacctcaggcaccatgaataactacccaacatggcgtcggactctgctgcgccgtgcgaaggaggaggagatgaagaggttctgcaaggcccagaccatccaacggcgactaaatgagattgaggctgccttgagggagctagaggccgagggcgtgaagctggagctggccttgaggcgccagagcagttccccagaacagcaaaagaaactatgggtaggacagctgctacagctcgttgacaagaaaaacagcctggtggctgaggaggccgagctcatgatcacggtgcaggaattgaatctggaggagaaacagtggcagctggaccaggagctacgaggctacatgaaccgggaagaaaacctaaagacagctgctgatcggcaggctgaggaccaggtcctgaggaagctggtggatttggtcaaccagagagatgccctcatccgcttccaggaggagcgcaggctcagcgagctggccttggggacaggggcccagggctag

SEQ ID NO: 98 - DNA, 1404 bp, Homo sapiens
atgttctccctgaagacgcttccatttctgctcttactccatgtgcagatttccaaggcctttcctgtatcttctaaagagaaaaatacaaaaactgttcaggactacctggaaaagttctaccaattaccaagcaaccagtatcagtctacaaggaagaatggcactaatgtgatcgttgaaaagcttaaagaaatgcagcgattttttgggttgaatgtgacggggaagccaaatgaggaaactctggacatgatgaaaaagcctcgctgtggagtgcctgacagtggtggttttatgttaaccccaggaaaccccaagtgggaacgcactaacttgacctacaggattcgaaactataccccacagctgtcagaggctgaggtagaaagagctatcaaggatgcctttgaactctggagtgttgcatcacctctcatcttcaccaggatctcacagggagaggcagatatcaacattgctttttaccaaagagatcacggtgacaattctccatttgatggacccaatggaatccttgctcatgcctttcagccaggccaaggtattggaggagatgctcattttgatgccgaagaaacatggaccaacacctccgcaaattacaacttgtttcttgttgctgctcatgaatttggccattctttggggctcgctcactcctctgaccctggtgccttgatgtatcccaactatgctttcagggaaaccagcaactactcactccctcaagatgacatcgatggcattcaggccatctatggactttcaagcaaccctatccaacctactggaccaagcacacccaaaccctgtgaccccagtttgacatttgatgctatcaccacactccgtggagaaatacttttctttaaagacaggtacttctggagaaggcatcctcagctacaaagagtcgaaatgaattttatttctctattctggccatcccttccaactggtatacaggctgcttatgaagattttgacagagacctcattttcctatttaaaggcaaccaatactgggctctgagtggctatgatattctgcaaggttatcccaaggatatatcaaactatggcttccccagcagcgtccaagcaattgacgcagctgttttctacagaagtaaaacatacttctttgtaaatgaccaattctggagatatgataaccaaagacaattcatggagccaggttatcccaaaagcatatcaggtgcctttccaggaatagagagtaaagttgatgcagttttccagcaagaacatttcttccatgtcttcagtggaccaagatattacgcatttgatcttattgctcagagagttaccagagttgcaagaggcaataaatggcttaactgtagatatggctga

SEQ ID NO: 99 - DNA, 1749 bp, Homo sapiens
atgagcatagagacgctactggaggcggcccgcttcctggaatggcaagcgcagcaacaacagagagcacgtgaggagcaggagcggcttcgcttggagcaggagcgagagcaggaacagaagaaggccaatagcctggccaggctggcacatacccttcctgtggaggaaccccgcatggaggcgccacccctgcctctgtctccaccggctcccccgccggcacccccaccaccacttgccacccctgccccactgactgtcatccctatccctgtggtgaccaactcccctcagcctctacccccacccccacccttgcccgcggcagcccagcctctgcccctggcgcctcgtcagccggccctggttggcgcccccggactcagcattaaggagcctgcccccctgcccagcaggccgcaggtgcccacccctgctcccctactgccggactcgaaggccaccattccacccaatggcagccccaagcctttgcagcccctccccacgcctgtcctgaccatagcgccacaccctggagtccagcctcagctggccccccagcagccgcccccacccacgctggggaccctgaagttggcaccagctgaagaagtcaaatccagtgaacagaagaagaggcccggggggatcggaaccagagaagtccacaacaaattggagaagaacaggagggcccatctgaaagagtgctttgagaccctgaagcggaacatccccaacgtggatgacaagaagacgtccaatctgagcgtgctgcggacggcgctgcggtacatccagtccctgaagaggaaggagaaggaatatgagcatgaaatggagcggctggcacgtgagaagattgccacgcagcagcggctggcagagctcaagcacgagctgagccagtggatggacgtactggagattgaccgcgtgctgcggcagacgggccagcccgaggatgaccaggcctccacctccaccgcctctgagggtgaggacaacatagacgaggatatggaggaggaccgggcgggcctgggcccacctaagctgagccatcgtccccagccggagctgctgaagtccaccctgccaccccccagcaccacccctgcgcctctgcctccacacccacaccctcacccccactccgtggccctacctcctgcccacctccccgtgcagcagcagcagccacagcagaagacccctctgccagcccctcctcccccaccggctgcccctgcccagacactggtgccagctccagcccatctggtggcgacggctgggggtggctccacggtcatcgcccacacagccaccactcacgcttcagtcatccagactgtgaaccacgttctgcaggggccaggcggcaagcacatcgcccacatcgccccctcggcccccagccctgcggtgcaactggcgcctgccacaccccccattgggcacatcactgtgcaccctgccaccctcaaccatgtggcccacctgggctcccagctgcccttgtacccgcagcccgtggcagtgagccacatcgcccacaccctctcgcaccagcaagtcaacggcacggccggcctggggcccccggctactgtcatggcaaagccggccgtgggggctcaggtggtgcaccacccccagctggtgggccagaccgtgctcaaccctgtgaccatggtcaccatgccctccttcccagtcagcacactcaagctggcttga

SEQ ID NO: 100 - DNA, 777 bp, Homo sapiens
atggcggcgtctgtattaaacaccgtgctgaggcggcttcctatgctatctctcttccgaggttctcacagagttcaggttcccctccagactctttgcaccaaagctccctctgaggaagattctttgtcctcagttcccatttctccttataaggatgagccctggaaatatctggaatcagaagaataccaggagcgatatggttctcgccccgtctgggctgactaccgccgcaaccacaagggtggtgtacccccacagcggactcggaagacatgtattcgtcggaataaagttgttgggaatccctgccccatctgtcgagatcacaagttgcatgttgactttaggaacgtgaagctcttggagcaatttgtctgcgcccacacgggtatcatcttctatgctccatacacaggagtctgtgtgaagcagcacaagcggttgacccaggccatccagaaagccagggatcatggtctcctcatttaccacatcccccaggttgaaccacgggaccttgacttcagtacctctcatggggctgtgagtgctactccgccagcccccaccctggtctcaggtgacccctggtacccatggtacaactggaaacagccaccggagagagaactgtctcgccttcgccggctttaccagggtcatctccaagaagagagtggccccccacctgagtcaatgcccaagatgccccctagaacaccagcggaagcctcctccactgggcagacaggccctcagagtgctctgtag

SEQ ID NO: 101 - DNA, 2253 bp, Homo sapiens
atgttaagagctaagaatcagctttttttactttcacctcattacctgaggcaggtaaaagaatcatcaggctccaggctcatacagcaacgacttctacaccagcaacagccccttcacccagaatgggctgccctggctaaaaagcagctgaaaggcaaaaacccagaagacctaatatggcacaccccggaagggatctctataaaacccttgtattccaagagagatactatggacttacctgaagaacttccaggagtgaagccattcacacgtggaccatatcctaccatgtatacctttaggccctggaccatccgccagtatgctggttttagtactgtggaagaaagcaataagttctataaggacaacattaaggctggtcagcagggattatcagttgcctttgatctggcgacacatcgtggctatgattcagacaaccctcgagttcgtggtgatgttggaatggctggagttgctattgacactgtggaagataccaaaattctttttgatggaattcctttagaaaaaatgtcagtttccatgactatgaatggagcagttattccagttcttgcaaattttatagtaactggagaagaacaaggtgtacctaaagagaagcttactggtaccatccaaaatgatatactaaaggaatttatggttcgaaatacatacatttttcctccagaaccatccatgaaaattattgctgacatatttgaatatacagcaaagcacatgccaaaatttaattcaatttcaattagtggataccatatgcaggaagcaggggctgatgccattctggagctggcctatactttagcagatggattggagtactctagaactggactccaggctggcctgacaattgatgaatttgcaccaaggttgtctttcttctggggaattggaatgaatttctatatggaaatagcaaagatgagagctggtagaagactctgggctcacttaatagagaaaatgtttcagcctaaaaactcaaaatctcttcttctaagagcacactgtcagacatctggatggtcacttactgagcaggatccctacaataatattgtccgtactgcaatagaagcaatggcagcagtatttggagggactcagtctttgcacacaaattcttttgatgaagctttgggtttgccaactgtgaaaagtgctcgaattgccaggaacacacaaatcatcattcaagaagaatctgggattcccaaagtggctgatccttggggaggttcttacatgatggaatgtctcacaaatgatgtttatgatgctgctttaaagctcattaatgaaattgaagaaatgggtggaatggccaaagctgtagctgagggaatacctaaacttcgaattgaagaatgtgctgcccgaagacaagctagaatagattctggttctgaagtaattgttggagtaaataagtaccagttggaaaaagaagacgctgtagaagttctggcaattgataatacttcagtgcgaaacaggcagattgaaaaacttaagaagatcaaatccagcagggatcaagctttggctgaacgttgtcttgctgcactaaccgaatgtgctgctagcggagatggaaatatcctggctcttgcagtggatgcatctcgggcaagatgtacagtgggagaaatcacagatgccctgaaaaaggtatttggtgaacataaagcgaatgatcgaatggtgagtggagcatatcgccaggaatttggagaaagtaaagagataacatctgctatcaagagggttcataaattcatggaacgtgaaggtcgcagacctcgtcttcttgtagcaaaaatgggacaagatggccatgacagaggagcaaaagttattgctacaggatttgctgatcttggttttgatgtggacataggccctcttttccagactcctcgtgaagtggcccagcaggctgtggatgcggatgtgcatgctgtgggcataagcaccctcgctgctggtcataaaaccctagttcctgaactcatcaaagaacttaactcccttggacggccagatattcttgtcatgtgtggaggggtgataccacctcaggattatgaatttctgtttgaagttggtgtttccaatgtatttggtcctgggactcgaattccaaaggctgccgttcaggtgcttgatgatattgagaagtgtttggaaaagaagcagcaatctgtataa

SEQ ID NO: 102 - DNA, 1989 bp, Homo sapiens
atggttgtttccgaagtggacatcgcaaaagctgatccagctgctgcatcccaccctctattactgaatggagatgctactgtggcccagaaaaatccaggctcggtggctgagaacaacctgtgcagccagtatgaggagaaggtgcgcccctgcatcgacctcattgactccctgcgggctctaggtgtggagcaggacctggccctgccagccatcgccgtcatcggggaccagagctcgggcaagagctccgtgttggaggcactgtcaggagttgcccttcccagaggcagcgggatcgtgaccagatgcccgctggtgctgaaactgaagaaacttgtgaacgaagataagtggagaggcaaggtcagttaccaggactacgagattgagatttcggatgcttcagaggtagaaaaggaaattaataaagcccagaatgccatcgccggggaaggaatgggaatcagtcatgagctaatcaccctggagatcagctcccgagatgtcccggatctgactctaatagaccttcctggcataaccagagtggctgtgggcaatcagcctgctgacattgggtataagatcaagacactcatcaagaagtacatccagaggcaggagacaatcagcctggtggtggtccccagtaatgtggacatcgccaccacagaggctctcagcatggcccaggaggtggaccccgagggagacaggaccatcggaatcttgacgaagcctgatctggtggacaaaggaactgaagacaaggttgtggacgtggtgcggaacctcgtgttccacctgaagaagggttacatgattgtcaagtgccggggccagcaggagatccaggaccagctgagcctgtccgaagccctgcagagagagaagatcttctttgagaaccacccatatttcagggatctgctggaggaaggaaaggccacggttccctgcctggcagaaaaacttaccagcgagctcatcacacatatctgtaaatctctgcccctgttagaaaatcaaatcaaggagactcaccagagaataacagaggagctacaaaagtatggtgtcgacataccggaagacgaaaatgaaaaaatgttcttcctgatagataaagttaatgcctttaatcaggacatcactgctctcatgcaaggagaggaaactgtaggggaggaagacattcggctgtttaccagactccgacacgagttccacaaatggagtacaataattgaaaacaattttcaagaaggccataaaattttgagtagaaaaatccagaaatttgaaaatcagtatcgtggtagagagctgccaggctttgtgaattacaggacatttgagacaatcgtgaaacagcaaatcaaggcactggaagagccggctgtggatatgctacacaccgtgacggatatggtccggcttgctttcacagatgtttcgataaaaaattttgaagagttttttaacctccacagaaccgccaagtccaaaattgaagacattagagcagaacaagagagagaaggtgagaagctgatccgcctccacttccagatggaacagattgtctactgccaggaccaggtatacaggggtgcattgcagaaggtcagagagaaggagctggaagaagaaaagaagaagaaatcctgggattttggggctttccagtccagctcggcaacagactcttccatggaggagatctttcagcacctgatggcctatcaccaggaggccagcaagcgcatctccagccacatccctttgatcatccagttcttcatgctccagacgtacggccagcagcttcagaaggccatgctgcagctcctgcaggacaaggacacctacagctggctcctgaaggagcggagcgacaccagcgacaagcggaagttcctgaaggagcggcttgcacggctgacgcaggctcggcgccggcttgcccagttccccggttaa

SEQ ID NO: 103 - DNA, 519 bp, Homo sapiens
atgtccagcaagcgggccaaagccaagaccaccaagaagcggccacagcgggccacatccaatgtcttcgcaatgtttgaccagtcccagatccaggagtttaaggaggctttcaacatgattgaccagaaccgtgatggcttcattgacaaggaggacctgcacgacatgctggcctcgctggggaagaaccccacagacgaatacctggagggcatgatgagcgaggccccggggcccatcaacttcaccatgttcctcaccatgtttggggagaagctgaacggcacggaccccgaggatgtgattcgcaacgcctttgcctgcttcgacgaggaagcctcaggtttcatccatgaggaccacctccgggagctgctcaccaccatgggtgaccgcttcacagatgaggaagtggacgagatgtaccgggaggcacccattgataagaaaggcaacttcaactacgtggagttcacccgcatcctcaaacatggcgccaaggataaagacgactag

SEQ ID NO: 104 - DNA, 4398 bp, Homo sapiens
atgtcccttgtgactgtccccttctaccagaagagacataggcacttcgaccagtcctaccgtaatattcaaacacggtacctgctggacgaatatgcgtcaaaaaagcgagcttccacccaggcatcttcccagaagtccttgagtcagcggtcgtcttcacagagagcctccagccagacgtccctgggaggaaccatctgcagggtctgtgcgaagcgagtgagcacgcaggaagatgaggagcaggagaacagaagcaggtaccagtccctggtggccgcctatggtgaggccaagcgacagcgcttcctcagcgagctggcccacttggaggaggatgtccacctggcacgctcccaggcccgcgacaagctggacaaatacgccattcagcagatgatggaggacaagctggcctgggagagacacacatttgaagagcggataagcagggctcctgagatcctggtgcggctgcgatcccacaccgtctgggagaggatgtctgtgaaactctgcttcaccgtgcaaggatttcccacgcccgtggtgcagtggtacaaagatggcagtctgatttgccaggcggctgaaccgggaaagtacaggattgagagcaactatggcgtacacacactggagatcaacagggcagactttgacgacactgcgacatactcagcagtggccaccaatgcccacggacaagtgtccaccaacgcggcggtggtggtgagaaggttccggggagacgaggaaccattccgttcggtgggactcccgattggattgcccctgtcatcgatgattccgtacacgcacttcgacgtccagtttttggagaagtttggggtcaccttcaggagggaaggcgagacggtcactctcaagtgcaccatgctggtgacgccggacctgaagcgggtgcagccgcgcgccgagtggtaccgcgatgacgtgctgttgaaagagtccaagtggacgaagatgttctttggagaaggccaggcctccctgtccttcagccacctgcacaaggacgacgagggcctgtacaccctgcgcatcgtgtctcggggcggcgtcagcgaccacagcgccttcctgtttgtcagagatgctgacccgctggtcacaggggcccccggtgcacccatggacttgcagtgccacgacgccaaccgggactacgtcatcgtgacctggaagccgcccaacaccaccactgagagccccgtcatgggctattttgtggaccgatgtgaagtaggaacgaataattgggtgcagtgcaatgatgcaccggtgaaaatctgcaaatacccggtcacagggctttttgaaggaaggtcttacatattccgagtgagggcagtgaacagtgcgggcatcagccgaccctccagggtctctgatgcggtggctgcacttgaccccttggacctcagaaggttacaagccgttcatttggagggagagaaggagattgccatttatcaggatgaccttgaaggtgacgcccaggttccagggcctcccaccggtgtgcacgcttccgagatcagcagaaactatgtcgtcctcagctgggagccacccactccccgtggcaaggacccgctcatgtacttcattgagaagtcggtggtggggagcggcagctggcagagagtcaacgcccagacggctgtgagatccccgagatatgccgtgtttgacctcatggaagggaagtcttatgtgttccgagtgctgtcagcaaaccggcatggcctgagcgaaccttcggagataacgtcccccattcaggcccaggatgtgaccgttgtcccttctgctccgggtcgggttcttgcttcccgaaacaccaagacgtcggtggtggtgcagtgggaccgacctaagcatgaggaggacctgctgggctactacgtggactgctgtgtggccggaaccaacctctgggagccctgcaaccacaagcccattggatacaacaggttcgtggtgcacggcttaaccacgggagagcagtacatcttccgagtcaaggcggtcaatgctgtggggatgagtgaaaattcccaggaatcagacgtcataaaagtgcaggccgcactcaccgtcccgtcccatccttatgggattacgctcctcaactgtgacggccactccatgaccctcggctggaaggtcccgaaattcagtggtggctcgcccatcctgggctactacctggacaagcgtgaagttcaccataaaaactggcacgaggtcaattcctcacccagcaaaccgacaatcctaacggtggacggcttgacggaaggctcactctacgagttcaaaatcgccgccgtcaacctggccggcatcggggagccctcagatcccagtgagcacttcaagtgtgaggcctggaccatgccggagcccggtcctgcctacgacttgacgttctgtgaggtcagggacacgtccttggtcatgctgtggaaggcccctgtgtactccggcagcagccctgtttctggatatttcgtggacttcagggaggaggatgctggagagtggatcactgtaaatcagacgacaacagccaaccgttatttaaaggtctctgacctgcagcaaggtaagacctatgtcttcagggtccgggcagtcaatgcaaatggcgtggggaagccctcagacacgtcggagcctgtgctggtagaggcgagaccaggcaccaaggaaatcagtgctggtgtcgatgaacaaggcaacatctatctgggcttcgactgccaggaaatgacagacgcgtctcagttcacctggtgtaaatcctacgaggagatttcagatgatgagaggtttaaaatcgaaaccgtgggggatcactccaagctgtacttaaagaatccggataaggaggatttagggacttactccgtgtctgtaagtgatacagacggagtgtcctccagttttgttctggacccagaagagctcgagcgtttgatggcattgagcaatgaaataaagaaccccacaattcctctgaaatcggaattagcttatgagatttttgataaggggcgggttcgcttctggctccaggctgagcacttatcaccagatgccagctaccgatttattattaacgacagagaagtctctgacagcgagatacacagaattaaatgtgacaaagctactggcattattgagatggtgatggatcgatttagtattgaaaatgaggggacctacactgtgcagattcatgatgggaaagccaaaagtcagtcttctctagttcttattggagatgcattcaagactgtgctggaagaggctgagtttcaaaggaaagaatttctcaggaaacaaggccctcattttgctgagtacttgcactgggatgtcacggaagaatgtgaagttcgacttgtttgcaaggttgcaaacaccaagaaagaaaccgttttcaaatggctcaaggatgatgttctgtatgaaacggagacactgcctaacctggagaggggaatctgtgagctcctcatcccaaagttgtcaaagaaggaccacggtgaatacaaggcaaccttgaaagatgacagaggccaagatgtgtccatccttgaaatagctggcaaagtgtatgatgatatgattttggcaatgagtagagtctgtgggaaatctgcttcgccactgaaggtactctgcaccccagaaggaatacgacttcagtgtttcatgaagtattttacagacgaaatgaaagtgaactggtgtcacaaagatgctaagatctcatccagtgagcatatgagaatcggggggagtgaagagatggcttggctgcagatatgtgagccgactgagaaggataaaggaaaatacacttttgagattttcgatggcaaagacaaccatcaacgctcccttgacctgtccggacaagcttttgatgaagcatttgcagaattccagcaattcaaagctgctgcttttgcagagaagaatcgtggcaggttgatcggcggcttgcctgacgtggtgaccatcatggaagggaagaccttgaatctgacctgcacggtgtttggaaaccctgaccccgaagtgatttggttcaagaacgaccaggacatccagctcagcgagcacttctcggtgaaggtggagcaggccaagtacgtcagcatgaccatcaaaggcgtgacctccgaggactcgggcaagtacagcatcaacatcaagaataagtatggcggggagaagatcgacgtgacagtgagcgtgtacaaacacggggagaagatcccggacatggccccgccccagcaagccaagcccaagctcatccccgcgtctgcctcagcggcaggccagtga

SEQ ID NO: 105 - DNA, 1173 bp, Homo sapiens
atgcgcacgcgcacagggagtcagctggctgcgcgggaggtcacgggaagtggggcggtgcccagacagctggagggaaggaggtgtcaggcggggagagacgcaaacggcgggaccagcagcgacggtagcagcagcatggccgcgatctatgggggtgtagaggggggaggcacacgatccgaggtccttttagtctcagaggatgggaagatcctggcagaagcagatggactgagcacaaaccactggctgatcgggacagacaagtgtgtggagaggatcaatgagatggtgaacagggccaaacggaaagcaggggtggatcctctggtaccgctgcgaagcttgggcctatctctgagcggtggggaccaggaggacgcggggaggatcctgatcgaggagctgagggaccgatttccctacctgagtgaaagctacttaatcaccaccgatgccgccggctccatcgccacagctacaccggatggtggagttgtgctcatatctggaacaggctccaactgcaggctcatcaaccctgatggctccgagagtggctgcggcggctggggccatatgatgggtgatgagggttcagcctactggatcgcacaccaagcagtgaaaatagtgtttgactccattgacaacctagaggcggctcctcatgatatcggctacgtcaaacaggccatgttccactatttccaggtgccagatcggctagggatactcactcacctgtatagggactttgataaatgcaggtttgctgggttttgccggaaaattgcagaaggtgctcagcagggagaccccctttcccgctatatcttcaggaaggctggggagatgctgggcagacacatcgtagcagtgttgcccgagattgacccggtcttgttccagggcaagattggactccccatcctgtgcgtgggctctgtgtggaagagctgggagctgctgaaggaaggttttcttctggcgctgacccagggcagagagatccaggctcagaacttcttctccagcttcaccctgatgaagctgaggcactcctccgctctgggtggggccagcctaggggccaggcacatcgggcacctcctccccatggactatagcgccaatgccattgccttctattcctacaccttttcctag

SEQ ID NO: 106 - DNA, 924 bp, Homo sapiens
atggaagctgataaagatgacacacaacaaattcttaaggagcattcgccagatgaatttataaaagatgaacaaaataagggactaattgatgaaattacaaagaaaaatattcaactaaagaaggagatccaaaagcttgaaacggagttacaagaggctaccaaagaattccagattaaagaggatattcctgaaacaaagatgaaattcttatcagttgaaactcctgagaatgacagccagttgtcaaatatctcctgttcgtttcaagtgagctcgaaagttccttatgagatacaaaaaggacaagcacttatcacctttgaaaaagaagaagttgctcaaaatgtggtaagcatgagtaaacatcatgtacagataaaagatgtaaatctggaggttacggccaagccagttccattaaattcaggagtcagattccaggtttatgtagaagtttctaaaatgaaaatcaatgttactgaaattcctgacacattgcgtgaagatcaaatgagagacaaactagagctgagcttttcaaagtcccgaaatggaggcggagaggtggaccgcgtggactatgacagacagtccgggagtgcagtcatcacgtttgtggagattggagtggctgacaagattttgaaaaagaaagaataccctctttatataaatcaaacctgccatagagttactgtttctccatacacagaaatacacttgaaaaagtatcagatattttcaggaacatctaagaggacagtgcttctgacaggaatggaaggcattcaaatggatgaagaaattgtggaggatttaattaacattcactttcaacgggcaaagaatggaggtggagaagtagatgtggtcaagtgttctctaggtcaacctcacatagcatactttgaagaatag

SEQ ID NO: 107 - DNA, 1272 bp, Homo sapiens
atggccatttgtcaattcttccttcaaggccggtgccgctttggagatcggtgctggaacgaacatcccggtgctaggggtgcaggaggaggacggcagcaaccgcagcagcagccttcaggtaataatagacgtggatggaatacaactagccagagatattccaatgtcatccagccatccagtttctccaaatccacaccatgggggggcagcagagatcaagaaaagccatatttcagttcttttgattctggagcttcaactaacaggaaggaaggctttggattgtctgagaacccatttgcttcacttagtcctgatgagcagaaagatgaaaagaaacttctggaaggaattgtaaaagatatggaggtttgggaatcatcagggcagtggatgttttctgtttattcaccagtgaaaaagaaacctaatatttcaggttttacagacatttcaccagaggaattgaggcttgaataccataacttcttaaccagcaataacttacagagttatctaaattctgtccaacgtttaataaatcaatggaggaacagggtaaatgaactgaaaagtctaaatatatcaactaaagtagctttgctctctgatgtaaaggatggagtaaatcaagcagcacctgcatttggatttggcagcagtcaagcagcaacatttatgtcgccaggctttccagtcaataacagcagcagtgataatgctcagaactttagttttaaaacaaactctggatttgctgctgcctcttctggaagccctgctggttttgggagttccccagcatttggagctgcagcctctaccagttcaggtatctctacttctgctccagcttttggatttgggaagcctgaagtcacatcggctgcatcattttcattcaaaagccctgcagcttccagttttggatcacctggattttcaggacttccagcttccttggcaacaggtcctgtcagagctccagtggccccagcctttggaggtggcagttctgtggctggttttggtagtccgggctcacattctcacactgctttttctaagccatccagtgacacttttggaaatagcagcatatccacttctctgtcagcctcaagcagcatcattgcaacagataatgtgttattcacacccagagataaactaacagtagaagaactggaacaatttcaatccaagaaatttactctgggaaaaattccattaaagcctccacctctggaacttctaaatgtttaa

SEQ ID NO: 108 - DNA, 1107 bp, Homo sapiens
atgcagcctggatccagccggtgtgaagaggagaccccttccctcttgtggggtttggatcctgtgtttctagcctttgcaaaactctacatcagggatatcctggacatgaaggagtcccgccaggtgccaggtgtatttttgtacaatggacatccaataaaacaggtagatgtcttgggaactgtcattggagtgagagaaagagatgctttctacagttatggagtggatgacagcactggagttataaactgcatctgctggaaaaagttgaatactgagtctgtatcagctgctccaagtgcagcaagagagctcagcttaacctcacaacttaagaagctacaagagaccattgagcagaaaacaaagatagagatcggggacacgatccgagtcagaggcagtatccgcacatacagagaagagcgagagattcatgccaccacttactataaagtggacgacccagtgtggaacattcaaattgcaaggatgcttgagctgcccactatctacaggaaagtttatgaccagccttttcacagctcagccctagagaaagaagaggcactaagcaatccaggcgccctggacctccccagtctcacgagtttgctgagtgaaaaagccaaagaattcctcatggagaacagagtgcagagcttttaccagcaggagctggaaatggtggagtctttgctgtcccttgccaatcagcctgtgattcacagtgcctcctccgaccaagtgaattttaagaaggacaccacttccaaggcaattcatagtatatttaagaatgctatacaactgctgcaggaaaaaggacttgttttccagaaagatgatggttttgataacctatactatgtaaccagagaagacaaagacctgcacagaaagatccaccggatcattcagcaggactgccagaaaccaaatcacatggagaagggctgtcacttcctgcacatcttggcctgtgctcgcctgagcatccgcccgggcctgagcgaggctgtgctgcagcaagttctggagctcctggaggaccagagtgacattgtcagcacaatggagcactactacacagcgttctga

SEQ ID NO: 109 - DNA, 2211 bp, Homo sapiens
atggcgtccatcatggaagggccgctgagcaaatggactaacgtgatgaagggctggcagtaccgttggttcgtgctggactacaatgcaggactgctctcctactacacgtccaaggacaaaatgatgagaggctctcgcagaggatgtgttagactcagaggagctgtgattggtatagacgatgaggacgacagcaccttcacaataactgttgatcagaaaaccttccatttccaggcccgtgatgctgatgagcgagagaagtggatccatgccttagaagaaacaattcttcgacatactctccagcttcaaggtttggattcaggatttgttcctagtgtccaagattttgataagaaacttacagaagctgatgcttacctacaaatcttgattgaacaattaaagctttttgatgacaagcttcaaaactgcaaagaagatgaacagagaaagaaaattgaaactctcaaagagacaacaaatagcatggtagaatcaattaaacactgcattgtgttgctgcagattgccaaagaccagagtaatgcggagaagcacgcagatggaatgataagtactattaatcccgtagatgcaatatatcaacctagtcctttggaacctgtgatcagcacaatgccttcccagactgtgttacctccagaacctgttcagttgtgtaagtcagagcagcgtccatcttccctaccagttggacctgtgttggctaccttgggacatcatcagactcctacaccaaatagtacaggcagtggccattcaccaccgagtagcagtctcacttctccaagccacgtgaacttgtctccaaatacagtcccagagttctcttactccagcagtgaagatgaattttatgatgctgatgaattccatcaaagtggctcatccccaaagcgcttaatagattcttctggatctgcctcagtcctgacacacagcagctcgggaaatagtctaaaacgcccagataccacagaatcacttaattcttccttgtccaatggaacaagtgatgctgacctgtttgattcacatgatgacagagatgatgatgcggaggcagggtctgtggaggagcacaagagcgttatcatgcatctcttgtcgcaggttagacttggaatggatcttactaaggtagttcttccaacgtttattcttgaaagaagatctcttttagaaatgtatgcagacttttttgcacatccggacctgtttgtgagcattagtgaccagaaggatcccaaggatcgaatggttcaggttgtgaaatggtacctctcagcctttcatgcgggaaggaaaggatcagttgccaaaaagccatacaatcccattttgggcgagatttttcagtgtcattggacattaccaaatgatactgaagagaacacagaactagtttcagaaggaccagttccctgggtttccaaaaacagtgtaacatttgtggctgagcaggtttcccatcatccacccatttcagccttttatgctgagtgttttaacaagaagatacaattcaatgctcatatctggaccaaatcaaaattccttgggatgtcaattggggtgcacaacatagggcagggctgtgtctcatgtctagactatgatgaacattacattctcacattccccaatggctatggaaggtctatcctcacagtgccctgggtggaattaggaggagaatgcaatattaattgttccaaaacaggctatagtgcaaatatcatcttccacactaaacccttctatgggggcaagaagcacagaattactgccgagattttttctccaaatgacaagaagtctttttgctcaattgaaggggaatggaatggtgtgatgtatgcaaaatatgcaacaggggaaaatacagtctttgtagataccaagaagttgcctataatcaagaagaaagtgaggaagttggaagatcagaacgagtatgaatcccgcagcctttggaaggatgtcactttcaacttaaaaatcagagacattgatgcagcaactgaagcaaagcacaggcttgaagaaagacaaagagcagaagcccgagaaaggaaggagaaggaaattcagtgggagacaaggttatttcatgaagatggagaatgctgggtttatgatgaaccattactgaaacgtcttggtgctgccaagcattag

SEQ ID NO: 110 - DNA, 1179 bp, Homo sapiens
atgggggtcaaccagtctgtgggctttccacctgtcacaggaccccacctcgtaggctgtggggatgtgatggagggtcagaatctccaggggagcttctttcgactcttctacccctgccaaaaggcagaggagaccatggagcagcccctgtggattccccgctatgagtactgcactggcctggccgagtacctgcagtttaataagcgctgcgggggcttgctgttcaacctggcggtgggatcttgtcgcctgcctgttagctggaatggcccctttaagacaaaggactctggataccccttgatcatcttctcccatggcctaggagccttcaggactttgtattcagccttctgcatggagctggcctcacgtggctttgtggttgctgtgccagagcacagggaccggtcagcggcaaccacctatttctgcaagcaggccccagaagagaaccagcccaccaatgaatcgctgcaggaggaatggatccctttccgtcgagttgaggaaggggagaaggaatttcatgttcggaatccccaggtgcatcagcgggtaagcgagtgtttacgggtgttgaagatcctgcaagaggtcactgctgggcagactgtcttcaacatcttgcctggtggcttggatctgatgactttgaagggcaacattgacatgagccgtgtggctgtgatgggacattcatttggaggggccacagctattctggctttggccaaggagacccaatttcggtgtgcggtggctctggatgcttggatgtttcctctggaacgtgacttttaccccaaggcccgaggacctgtgttctttatcaatactgagaaattccagacaatggagagtgtcaatttgatgaagaagatatgtgcccagcatgaacagtctaggatcataaccgttcttggttctgttcatcggagtcaaactgactttgcttttgtgactggcaacttgattggtaaattcttctccactgaaacccgtgggagcctggacccctatgaagggcaggaggttatggtacgggccatgttggccttcctgcagaagcacctcgacctgaaagaagactataatcaatggaacaaccttattgaaggcattggaccgtcgctcaccccaggggccccccaccatctgtccagcctgtag

SEQ ID NO: 111 - DNA, 1140 bp, Homo sapiens
atggcgtggcgaggctgggcgcagagaggctggggctgcggccaggcgtggggtgcgtcggtgggcggccgcagctgcgaggagctcactgcggtcctaaccccgccgcagctcctcggacgcaggtttaacttctttattcaacaaaaatgcggattcagaaaagcacccaggaaggttgaacctcgaagatcagacccagggacaagtggtgaagcatacaagagaagtgctttgattcctcctgtggaagaaacagtcttttatccttctccctatcctataaggagtctcataaaacctttattttttactgttgggtttacaggctgtgcatttggatcagctgctatttggcaatatgaatcactgaaatccagggtccagagttattttgatggtataaaagctgattggttggatagcataagaccacaaaaagaaggagacttcagaaaggagattaacaagtggtggaataacctaagtgatggccagcggactgtgacaggtattatagctgcaaatgtccttgtattctgtttatggagagtaccttctctgcagcggacaatgatcagatatttcacatcgaatccagcctcaaaggtcctttgttctccaatgttgctgtcaacattcagtcatttctccttatttcacatggcagcaaatatgtatgttttgtggagcttctcttccagcatagtgaacattctgggtcaagagcagttcatggcagtgtacctatctgcaggtgttatttccaattttgtcagttacgtgggtaaagttgccacaggaagatatggaccatcacttggtgcatctggtgccatcatgacagtcctcgcagctgtctgcactaagatcccagaagggaggcttgccattattttccttccgatgttcacgttcacagcagggaatgccctgaaagccattatcgccatggatacagcaggaatgatcctgggatggaaattttttgatcatgcggcacatcttgggggagctctttttggaatatggtatgttacttacggtcatgaactgatttggaagaacagggagccgctagtgaaaatctggcatgaaataaggactaatggccccaaaaaaggaggtggctctaagtaa

SEQ ID NO: 112 - DNA, 378 bp, Homo sapiens
atggcggacgaggagcttgaggcgctgaggagacagaggctggccgagctgcaggccaaacacggggatcctggtgatgcggcccaacaggaagcaaagcacagggaagcagaaatgagaaacagtatcttagcccaagttctggatcagtcggcccgggccaggttaagtaacttagcacttgtaaagcctgaaaaaactaaagcagtagagaattaccttatacagatggcaagatatggacaactaagtgagaaggtatcagaacaaggtttaatagaaatccttaaaaaagtaagccaacaaacagaaaagacaacaacagtgaaattcaacagaagaaaagtaatggactctgatgaagatgacgattattga

SEQ ID NO: 113 - DNA, 1038 bp, Homo sapiens
atgagcctcttcgggcttctcctgctgacatctgccctggccggccagagacaggggactcaggcggaatccaacctgagtagtaaattccagttttccagcaacaaggaacagaacggagtacaagatcctcagcatgagagaattattactgtgtctactaatggaagtattcacagcccaaggtttcctcatacttatccaagaaatacggtcttggtatggagattagtagcagtagaggaaaatgtatggatacaacttacgtttgatgaaagatttgggcttgaagacccagaagatgacatatgcaagtatgattttgtagaagttgaggaacccagtgatggaactatattagggcgctggtgtggttctggtactgtaccaggaaaacagatttctaaaggaaatcaaattaggataagatttgtatctgatgaatattttccttctgaaccagggttctgcatccactacaacattgtcatgccacaattcacagaagctgtgagtccttcagtgctacccccttcagctttgccactggacctgcttaataatgctataactgcctttagtaccttggaagaccttattcgatatcttgaaccagagagatggcagttggacttagaagatctatataggccaacttggcaacttcttggcaaggcttttgtttttggaagaaaatccagagtggtggatctgaaccttctaacagaggaggtaagattatacagctgcacacctcgtaacttctcagtgtccataagggaagaactaaagagaaccgataccattttctggccaggttgtctcctggttaaacgctgtggtgggaactgtgcctgttgtctccacaattgcaatgaatgtcaatgtgtcccaagcaaagttactaaaaaataccacgaggtccttcagttgagaccaaagaccggtgtcaggggattgcacaaatcactcaccgacgtggccctggagcaccatgaggagtgtgactgtgtgtgcagagggagcacaggaggatag

SEQ ID NO: 114 - DNA, 819 bp, Homo sapiens
atggctgccaaagtgtttgagtccattggcaagtttggcctggccttagctgttgcaggaggcgtggtgaactctgccttatataatgtggatgctgggcacagagctgtcatctttgaccgattccgtggagtgcaggacattgtggtaggggaagggactcattttctcatcccgtgggtacagaaaccaattatctttgactgccgttctcgaccacgtaatgtgccagtcatcactggtagcaaagatttacagaatgtcaacatcacactgcgcatcctcttccggcctgtcgccagccagcttcctcgcatcttcaccagcatcggagaggactatgatgagcgtgtgctgccgtccatcacaactgagatcctcaagtcagtggtggctcgctttgatgctggagaactaatcacccagagagagctggtctccaggcaggtgagcgacgaccttacagagcgagccgccacctttgggctcatcctggatgacgtgtccttgacacatctgaccttcgggaaggagttcacagaagcggtggaagccaaacaggtggctcagcaggaagcagagagggccagatttgtggtggaaaaggctgagcaacagaaaaaggcggccatcatctctgctgagggcgactccaaggcagctgagctgattgccaactcactggccactgcaggggatggcctgatcgagctgcgcaagctggaagctgcagaggacatcgcgtaccagctctcacgctctcggaacatcacctacctgccagcggggcagtccgtgctcctccagctgccccagtga

SEQ ID NO: 115 - DNA, 6120 bp, Homo sapiens
atggatatagttgatacatttaatcatttaattcctactgaacacttagatgatgccctatttctaggatccaacctggagaatgaagtctgtgaggattttagtgcaagtcaaaatgtcttagaggactcgctgaagaacatgctcagcgataaggatcctatgctaggatctgcaagtaaccagttctgtttgcctgttttggatagcaatgatcccaatttccagatgccttgttcaacagttgttggtcttgacgatattatggatgaaggagttgttaaagaaagtggcaatgataccattgatgaagaagaactgattttacctaacaggaacttaagggacaaggtagaagaaaattcagtgagatctccaagaaaatcacctcgtttaatggcacaagaacaagtaagaagtttgcgacagagcactattgccaagcgttcaaatgcagcaccattaagtaacacaaaaaaagcatctgggaagactgtatctactgctaaagcaggagtgaaacaaccagaaaggagtcaggttaaagaagaagtatgtatgtcactgaaacctgagtaccataaggagaatagaaggtgcagccgaaatagcggacaaattgaagtggtacctgaagtatcagtgtcttcaagtcattcttcagtgtcatcttgtcttgaaatgaaggatgaagatggattagattctaagcataagtgtaataatccgggagaaatagatgtgccatctcatgaattaaattgttcacttctttcagagacttgtgttactattggagaaaagaaaaatgaagctttgatggaatgtaaagccaagcctgttggtagtccattgtttaagttttcagataaagaagaacatgaacaaaatgattccatttcaggtaaaacgggtgagactgttgttgaagaaatgatagcaacaagaaaagttgaacaagattcaaaggagacagtaaaattatcccatgaagatgaccatattcttgaggacgctggatcttctgatatttctagtgatgctgcttgtacaaatccaaataagacagaaaacagccttgtaggtttgcctagttgtgtagatgaagtgactgaatgtaatttggaattgaaggataccatgggtattgctgataaaactgagaacacccttgaaagaaataaaattgaaccgttgggttattgtgaagatgcggagtctaataggcagttggagagcactgagtttaataaatcaaacttagaggtggttgatactagtacttttggaccggaaagtaatatcttggaaaatgctatttgtgatgtgcctgaccaaaattcaaaacagttgaatgctatagaaagtactaaaatagagtcccatgaaacagcaaaccttcaggatgacagaaacagccagtcaagtagcgtttcttacttagagtcaaaaagtgtaaaatccaaacatacaaaacctgtaattcattctaagcaaaacatgaccacagatgctccgaagaaaattgttgcagcaaagtatgaagtaatacatagcaaaactaaagttaatgtcaaaagtgtgaaacgaaatactgatgtaccagaatctcagcaaaattttcataggccagtcaaagtcagaaaaaaacaaattgataaggagccaaagattcagagttgcaattctggggttaaatctgtgaaaaaccaagctcattctgtactgaaaaaaacattacaggatcaaactttagtacaaattttcaagcccttaactcattctttgagtgataagtcacacgctcatcctggttgcttgaaagaacctcatcatcctgcacaaactggacatgtatcacattctagccagaaacagtgtcataagcctcagcaacaggccccagcaatgaaaaccaatagtcacgtgaaggaagagcttgaacacccaggcgttgagcattttaaggaagaggataaactgaaactgaaaaaacctgagaagaacctacaaccccgccaaagaagaagcagcaaaagtttttctttagatgagccaccattgttcattccagataacatagctaccataagaagagaaggctctgatcatagctcctcatttgaaagcaaatatatgtggactcccagcaagcagtgtgggttttgcaaaaaaccacatggcaacaggtttatggttggctgtgggagatgtgatgactggtttcatggtgattgtgttgggttaagtctttctcaagcacagcagatgggcgaggaagacaaagaatatgtctgtgtaaaatgttgtgctgaagaagacaaaaagactgaaatactagatccagatactttggaaaaccaagctacagttgaattccatagtggagataaaacaatggagtgtgaaaagcttggattatcaaaacacacaacaaatgatagaaccaaatatatagatgatacagtgaagcacaaggtcaaaattttaaaacgggagtctggtgaaggcagaaattcatcagactgtagagataatgaaattaaaaaatggcagctagctcctcttcgtaagatgggacaaccagttttacctcggagatcctcagaagaaaaaagtgaaaaaataccgaaagagtctacaactgttacttgcacaggagaaaaagcttcaaaaccaggtactcatgagaagcaagagatgaaaaagaagaaagttgaaaaaggagtgcttaatgtacatcctgctgcttctgcttccaagccttctgcagatcagatcaggcaaagtgtcagacattctctcaaagacattcttatgaagagacttacagactcaaatttgaaggtaccagaggaaaaggcagcaaaagttgccacaaaaattgagaaagagcttttctctttttttcgggacacagatgctaaatataagaacaaatatagaagtttgatgtttaatttgaaagatcctaaaaacaatatattatttaaaaaagtactgaaaggagaagtaactcctgatcatcttatcagaatgagtccagaagaactagcttctaaagagttagctgcttggagacgaagagaaaacagacataccatagaaatgattgagaaagagcagagagaagtggaacgacggccaatcaccaaaataactcataaaggtgaaatagaaattgagagtgatgccccaatgaaagaacaggaagcagccatggagattcaggaaccagccgccaataagtcattggagaagccagaaggatctgaaaaacaaaaagaggaggttgactctatgtctaaagataccactagtcaacacagacagcatctttttgatctcaactgcaaaatctgcataggtcgaatggcaccacctgtagatgatctttctccaaaaaaagtaaaagttgttgtaggagtagctcgcaaacattcagacaatgaagcagaaagtatagcagatgcattatcttcaacctcaaatattttggcttctgaattctttgaggaggagaaacaggagtctccaaagtcaacgttctctcctgctccacgtccagagatgcctggaactgttgaagttgagtctacctttctggctcgattgaacttcatctggaaaggttttatcaacatgccttctgtggcaaaatttgttaccaaagcctatccagtatctggctccccagaatacctgacagaggacctaccagatagtattcaagtaggtggcaggatatcacctcagacagtttgggattatgtggaaaaaataaaagcatcaggaaccaaggaaatttgtgtggttcgcttcacaccagtaactgaagaagatcaaatttcttatactttgctctttgcatacttcagtagcagaaagcgctatggagtagctgctaacaacatgaagcaggttaaagatatgtaccttattcctttgggtgccacagataaaattccacaccctcttgtgccttttgatggacctgggcttgaactgcatagacctaatctattgttgggcttaattattcgtcagaaactgaagcgacagcacagtgcctgtgctagtactagtcatatagctgagactcctgaaagtgcaccaccaatagcattgccacctgataaaaaaagtaaaatagaagtttctacagaagaagcaccagaggaagaaaatgacttttttaattcttttacaactgtattacacaagcagagaaataaacctcagcagaatcttcaggaagaccttccaacagcagttgaacctttaatggaagtcaccaaacaggagccaccaaaacctttaagatttcttcctggcgtgttgattggctgggagaatcaacctactactctggaattagcaaataaacctcttcctgtggatgatatacttcaaagccttttgggcaccactggtcaagtatatgaccaggcccagtcagtgatggaacaaaacactgttaaagaaattccatttttaaatgagcagaccaactcaaaaatagagaaaacagataatgtggaagtaactgatggtgaaaacaaggagataaaagttaaagtagataatatttcagaatctacagataagtcagcagaaatagaaacatcagtagtagggtcctcttccatttctgcagggtctttgacgagtcttagtctcagaggtaagccaccagatgtttctacagaagcatttttaacaaatttatcaattcagtcaaaacaagaggaaactgtggagagtaaagagaaaacattaaaaagacagcttcaggaagatcaagagaataatttgcaagataaccagacttcaaatagttctccatgcagatctaatgtaggaaaaggaaacatagatggtaatgtgagctgtagtgaaaaccttgttgctaatacagcgaggtctccacagtttatcaacctgaaaagggatcctaggcaagcagcaggacgaagtcagcctgtaactacttcagaaagcaaagatggagatagttgccggaatggagaaaaacacatgctgcctggcctgtcacacaacaaggagcacttaacagaacaaatcaatgtagaggaaaagttgtgttctgcagagaaaaactcgtgtgttcagcagagtgacaatttaaaagttgcacaaaactcaccatcagtagaaaacatacagacttctcaagcagaacaagcaaaacccttacaggaggatattttaatgcaaaatattgaaactgtgcacccatttcgaagaggatcagcagtagcgacatctcattttgaagttggaaacacatgtccatcagaatttccttctaaaagcatcacctttacttccagaagcaccagccccagaacaagtacaaacttttcacccatgaggccacagcagcccaaccttcagcatctcaagtctagcccacctggatttccatttccagggcctcctaattttcccccacaaagcatgtttggatttccaccacatttgccacctccattacttccccctccaggctttggctttgctcaaaatcccatggttccctggccacctgttgttcatctcccaggtcagccacagcgtatgatgggtcctctctcacaagcatcaaggtatataggcccgcagaatttttaccaggttaaagacattcggaggccagaaaggcgccatagtgacccttggggtaggcaagaccaacagcaactggataggccatttaataggggtaaaggggaccgccagagattttatagtgattcacaccatttgaaaagagagcgacatgaaaaggaatgggagcaagaatctgaaaggcatagacgcagagacagaagccaagacaaggacagagacagaaaaagcagggaggaagggcacaaagataaagagagggcacggttatcacatggtgatcgaggaacagatggaaaagcaagcagagatagtaggaatgtagacaagaagccagataaacctaaaagtgaagactatgagaaggacaaagaacgagagaaaagtaaacacagagaaggagaaaaggacagggataggtaccacaaagatagggaccacactgacagaactaaaagcaaaaggtaa

SEQ ID NO: 116 - DNA, 348 bp, Homo sapiens
atgcaagctcaggcgccggtggtcgttgtgacccaacctggagtcggtcccggtccggccccccagaactccaactggcagacaggcatgtgtgactgtttcagcgactgcggagtctgtctctgtggcacattttgtttcccgtgccttgggtgtcaagttgcagctgatatgaatgaatgctgtctgtgtggaacaagcgtcgcaatgaggactctctacaggacccgatatggcatccctggatctatttgtgatgactatatggcaactctttgctgtcctcattgtactctttgccaaatcaagagagatatcaacagaaggagagccatgcgtactttctaa

SEQ ID NO: 117 - DNA, 3492 bp, Homo sapiens
atgcctgtgtccacctccctccaccaggatggcagccaggagcggccggtgagcctgacctctaccacctcctcgtcgggctcctcctgtgacagtcgcagtgccatggaggagcccagcagctccgaggctcccgccaagaatggggcaggctccctgagaagccggcatctgcccaacagcaacaacaactccagcagctggttgaacgtgaaggggcccctctccccgttcaacagccgggcagcggcagggcctgcacaccacaagctcagctacctgggccgagtggtgcgggagatcgtggagacagagcgcatgtacgtacaggacctgcgcagcatcgtggagagccaagagtttgatatctacactcagtattgcaacaattaccccaactccgtggccgccctgacggaatgcatgcgggacaagcagcaggccaagttctttcgggaccggcaggagctgctacagcactcgctgcccttgggctcctacctgctgaagccagtccagcgcatcctcaagtaccacctgctgctccaggaaattgccaagcattttgatgaagaagaggatggctttgaggtggtggaggatgccattgacaccatgacctgtgtggcctggtacatcaacgacatgaagaggaggcatgagcacgcggtccggctccaggagattcagtcactcctcatcaactggaaggggcccgacctgaccacctacggggagcttgtcctggagggcacattccgcgtgcatcgcgtgcgcaatgaaaggacctttttcctctttgacaaaacactgcttatcaccaagaagcggggcgatcactttgtctacaagggcaacatcccgtgctcctccctgatgctgatcgaaagcaccagagactccctgtgcttcactgtcacccactacaagcacagcaagcagcagtacagcatccaggccaagacagtggaggagaaacggaactggactcaccacatcaagaggctcatcctagagaaccaccatgccaccattccccagaaggccaaggaagccatcttggaaatggattcctattatcccaatcggtaccgctgcagcccagagcggctgaagaaggcttggtcctcccaggatgaggtgtccaccaatgtgcgccaggggcgccggcaatctgagccaaccaaacacctgctcaggcaactcaacgagaaagcccgagcagcaggaatgaagggaaaggggcgcagggagtctgaaagctccaggagcagcagaaggcccagtggccggtctccaaccagtactgagaagcgcatgagcttcgagtccatttcttccctgccagaggttgagccggaccctgaggctgggagtgagcaagaggtattttctgctgtggaagggcccagtgccgaggagacgccttcagacacagaatctccagaagtcctggagacacagcttgatgcccaccagggccttctggggatggaccccccaggtgacatggtggacttcgtggcagctgagagcactgaggaccttaaggccctgagcagcgaggaggaagaagaaatgggaggtgccgcccaggagcctgagagccttctgccaccctctgtgctggaccaggccagcgtcattgcggagcgatttgtcagcagcttctctcggcggagcagcgtggcacaggaggacagcaagtccagtggctttgggagcccgcggctggtcagccggagcagcagcgtgctcagcctggagggcagcgagaagggcctggcccggcatggcagtgccacagactccctcagctgtcagctctccccagaagtggacatcagtgtgggggtggccacagaggacagcccttctgtcaatgggatggagcccccaagcccaggctgcccagtggagcctgaccggtcttcctgcaagaagaaggaatcagcactctccacccgagaccggctgttgctagacaagattaagagctattatgaaaatgcagaacaccatgatgcaggcttcagcgtccgtcgccgggagagcctctcctacatccccaaaggactggtaagaaactccatctccaggttcaacagccttccccggccagacccagagccagtacctccagtggggagcaagagacaggtgggctcccggccgacttcgtgggccctgtttgagctcccaggaccaagccaggcagtcaaaggggacccacctcccatctcagatgctgagttccgcccatcttcagaaattgtgaagatctgggagggaatggagtcttccggagggagccctgggaaggggccaggccagggccaggccaatggctttgacctgcatgagccactcttcatcctggaggagcatgagctgggagccatcacagaggagtcggccactgcctccccggaaagctcctctcccactgaggggcgcagcccggcccacctggcccgggagctgaaagagctggtgaaggagctgagcagcagtacccagggggagctggtggccccactgcacccccgcatcgtgcagctctcccacgtaatggacagccacgtgagcgagcgcgtcaagaacaaggtctaccagctggcccgccagtacagcctccggatcaagagcaacaagccagtgatggccaggccaccactgcagtgggaaaaggtggcccctgagagggatgggaagagccccactgtgccctgtctacaggaagaggctggagagccattaggtggcaaaggtaagaggaagccggtgctgtctctatttgactatgagcagctgatggcccaggagcacagccctcccaagccctcctcggctggggagatgtcaccacagcgtttcttcttcaacccgtctgctgtcagccagaggaccacctcgcctgggggccggccctccgcccggagccccctcagccccacagagaccttcagctggcccgacgtccgtgagctctgctccaagtatgcctcccgcgatgaggcacgccgagcagggggcggccggccccgcggcccacccgtcaacaggagccactcggtgccggagaacatggtagagccacctctgtcgggcagggtgggccgctgccgcagcctgagcaccaagaggggccggggaggcggagaggctgcccaatcccctgggcctctgccccagagcaagccggatggaggcgagaccctgtatgtcactgcagacctcaccctggaggacaaccggcgggtgattgtcatggagaagggaccccttcccagccccactgcagggctggaggagagcagtggccagggaccaagctcaccggtggccctgctggggcaggttcaggacttccagcagtctgcagagtgccagccgaaggaagagggttccagggacccggcagacccgagccagcagggcagagtgagaaaccttagagagaagttccaggccttgaactctgtcggttga

SEQ ID NO: 118 - DNA, 3060 bp, Homo sapiens
atggagccgggggaggtgaaggaccggatcctggagaacatctcgctgtcggtgaagaagttgcagagctattttgctgcatgtgaggatgagatccctgccatccggaaccatgacaaggtcctacagcgtctgtgtgagcacctggaccacgccctgctgtacggactgcaagacctctcctctggctactgggtgctcgtggtgcattttactcggagagaggccatcaagcagatcgaggtgctgcagcacgtggccaccaacctggggcgcagccgtgcctggctgtacctggccctcaacgagaactccttggagagctacctgcggttgttccaggagaacctgggcctgctgcataagtactacgtcaagaatgccctggtctgcagccacgatcacctgacgctcttcctgaccttggtgtccgggctagagttcattcgtttcgagctggatctggatgccccttacctagacctggccccctacatgcccgactactacaaacctcagtacctgctggactttgaagaccgccttcccagctcggtccacggctcagacagtctgtccctcaactctttcaactccgtcacctccaccaacctggagtgggatgacagtgcgattgccccatctagtgaggattatgattttggagatgtgtttccagcagtgccgtctgtacccagcacagactgggaagatggagacctcacagacacggtcagtggtccccgctccacagcctccgacctgaccagcagcaaggcctccaccaggagccccacccagcgccagaaccccttcaacgaggagccggcagagactgtgtcctcctctgacaccacccccgtgcacaccacctctcaggagaaggaggaggcccaggccctggacccgccggatgcctgcacggagctcgaggtcatcagggtcaccaagaagaagaaaattggcaagaagaaaaagagcagatcagatgaggaggcaagtccactccaccccgcctgcagccagaagaaatgtgccaagcagggggacggtgacagccgcaacggcagcccaagccttgggcgggactcgccagacactatgcttgcctccccccaggaggagggagaggggccgagcagcaccacggagagcagcgagcgctccgagccgggcctgctgatccctgagatgaaggacacctccatggagcgcttggggcagcccctgagcaaggttatcgaccagctcaacgggcagctggaccccagcacctggtgctcccgtgctgagcccccagaccagtcctttcggaccggctctcccggggatgccccggagaggccgccgctttgcgactttagtgaggggctttcagccccaatggacttctaccgctttaccgtcgagagtccaagcactgttacatcaggtggcggccaccatgaccctgcagggcttggccaaccgctgcatgttcctagtagccctgaggctgctggccaagaagaagagggaggaggaggagagggacagacgcctcggcccctagaggataccacgagggaggctcaggagctggaggcccagctgtccctggtcagggaggggcctgtgtctgagccagagcctgggacccaggaggttctctgccagctcaagcgagaccagcccagcccgtgtctgagtagcgctgaggattctggggtggatgagggacaggggagcccttcggagatggtccattcctcggagttcagagtagacaacaatcacctgctcctgctcatgatccacgtgttccgagaaaacgaagagcagctgttcaaaatgatccggatgagcaccgggcacatggagggcaacctgcagctgctgtacgtgctgctcacagactgctatgtctacctgctccggaaaggggccacagagaagccatacctggtggaagaggccgtttcttacaatgaacttgactatgtgtcggttggccttgaccagcagacggtgaagctggtgtgcaccaaccgcaggaagcagtttctgctggacacggctgatgtggcgctggctgagttctttttggcttctttgaagtcagccatgatcaaaggctgtcgagaacctccctaccccagcatcctgacggatgccaccatggagaagctggcactggccaaatttgtggcccaagaatcgaagtgtgaggcatctgctgtcaccgtgcgcttctacggccttgtgcactgggaggaccccacagacgagtccctgggccccacgccctgccactgctcaccccccgagggcaccatcaccaaagaaggcatgctgcactacaaggcgggcacctcctacctgggcaaggaacactggaagacgtgcttcgtggtgctcagcaacgggatcctctaccagtacccggaccgcaccgacgtcatccctctgctctcggtgaacatggggggggagcagtgcggtggctgccggagagccaacaccacggatcggccccacgccttccaggtcattctctccgaccggccctgcctggagctaagtgccgagagcgaggccgagatggccgagtggatgcagcatctctgccaggctgtgtccaaaggggtcatcccccagggcgtagctcccagcccctgcataccctgctgcctggtcctcacggatgaccgcctctttacgtgccatgaggattgccagaccagcttcttccgctctttgggcacagccaagctgggcgacatcagcgccgtctccaccgagccgggcaaggagtactgcgtcttggagttctcccaggacagccagcagctcctcccgccctgggtcatctacctgagctgcacttctgaactggaccgattgctgtctgcactgaactctgggtggaaaaccatctatcaggtggacctcccccacacggcgatccaggaagcctccaacaagaagaaattcgaggatgccttgagcctcatccacagcgcctggcagcggagcgacagtctctgccgcggccgagcctcccgagacccctggtgctga

SEQ ID NO: 119 - DNA, 828 bp, Homo sapiens
atgccgtacgccaaccagcctaccgtgcggatcacggagctcactgacgagaatgtcaagttcatcatcgagaacaccgacctggcggtggccaattcgattcggagggtcttcatcgctgaggttcccataatagccattgactgggttcagattgatgccaattcctcagttcttcatgatgaattcattgctcacaggcttggattaattcccctcattagtgatgacattgtggacaagctgcagtactctcgggactgcacatgtgaggagttctgccccgagtgctcggtggagttcaccctcgatgtgcggtgcaatgaagaccagacgcgacatgtcacgtctcgagacctcatctccaacagcccccgggtcattccggtgacatcccggaaccgagataatgaccccaatgactacgtggagcaggatgacatcctcatcgtcaagttgagaaagggccaggagctgagacttcgagcctatgccaaaaagggctttggcaaggagcatgccaagtggaaccctactgcaggggtggcttttgaatacgatccagacaatgccctgaggcacacagtgtaccccaagcccgaggaatggccaaagagtgagtactcggagctggatgaggatgagtcgcaggctccctatgaccccaacggcaagccagaaaggttttactacaatgtggagtcctgtggctctctgcgtcctgaaaccattgtcctgtcagccctctcaggattgaagaagaaactgagtgatttacaaactcaattaagccacgagatccagagtgatgtgctaaccataaattaa

SEQ ID NO: 120 - DNA, 993 bp, Homo sapiens
atgtccgacagcgagaagctcaacctggactcgatcatcgggcgcctgctggaagtgcagggctcgcggcctggcaagaatgtacagctgacagagaacgagatccgcggtctgtgcctgaaatcccgggagatttttctgagccagcccattcttctggagctggaggcacccctcaagatctgcggtgacatacacggccagtactacgaccttctgcgactatttgagtatggcggtttccctcccgagagcaactacctctttctgggggactatgtggacaggggcaagcagtccttggagaccatctgcctgctgctggcctataagatcaagtaccccgagaacttcttcctgctccgtgggaaccacgagtgtgccagcatcaaccgcatctatggtttctacgatgagtgcaagagacgctacaacatcaaactgtggaaaaccttcactgactgcttcaactgcctgcccatcgcggccatagtggacgaaaagatcttctgctgccacggaggcctgtccccggacctgcagtctatggagcagattcggcggatcatgcggcccacagatgtgcctgaccagggcctgctgtgtgacctgctgtggtctgaccctgacaaggacgtgcagggctggggcgagaacgaccgtggcgtctcttttacctttggagccgaggtggtggccaagttcctccacaagcacgacttggacctcatctgccgagcacaccaggtggtagaagacggctacgagttctttgccaagcggcagctggtgacacttttctcagctcccaactactgtggcgagtttgacaatgctggcgccatgatgagtgtggacgagaccctcatgtgctctttccagatcctcaagcccgccgacaagaacaaggggaagtacgggcagttcagtggcctgaaccctggaggccgacccatcaccccaccccgcaattccgccaaagccaagaaatag

SEQ ID NO: 121 - DNA, 984 bp, Homo sapiens
atggcggacggggagctgaacgtggacagcctcatcacccggctgctggaggtacgaggatgtcgtccaggaaagattgtgcagatgactgaagcagaagttcgaggcttatgtatcaagtctcgggagatctttctcagccagcctattcttttggaattggaagcaccgctgaaaatttgtggagatattcatggacaatatacagatttactgagattatttgaatatggaggtttcccaccagaagccaactatcttttcttaggagattatgtggacagaggaaagcagtctttggaaaccatttgtttgctattggcttataaaatcaaatatccagagaacttctttctcttaagaggaaaccatgagtgtgctagcatcaatcgcatttatggattctatgatgaatgcaaacgaagatttaatattaaattgtggaagaccttcactgattgttttaactgtctgcctatagcagccattgtggatgagaagatcttctgttgtcatggaggattgtcaccagacctgcaatctatggagcagattcggagaattatgagacctactgatgtccctgatacaggtttgctctgtgatttgctatggtctgatccagataaggatgtgcaaggctggggagaaaatgatcgtggtgtttcctttacttttggagctgatgtagtcagtaaatttctgaatcgtcatgatttagatttgatttgtcgagctcatcaggtggtggaagatggatatgaattttttgctaaacgacagttggtaaccttattttcagccccaaattactgtggcgagtttgataatgctggtggaatgatgagtgtggatgaaactttgatgtgttcatttcagatattgaaaccatctgaaaagaaagctaaataccagtatggtggactgaattctggacgtcctgtcactccacctcgaacagctaatccgccgaagaaaaggtga

SEQ ID NO: 122 - DNA, 381 bp, Homo sapiens
atggccgaggcaggggctgggctgagcgagaccgtcactgagacaacggttaccgtgacaaccgagcccgagaaccggagccttaccatcaaacttcggaaacggaagccagagaaaaaggtagaatggacaagtgacactgtggacaatgaacacatgggccgccgctcatccaaatgctgctgtatttatgagaaacctcgggcctttggcgagagctccacggaaagtgatgaggaggaagaagagggctgtggtcatacacactgtgtacgtggccaccgcaaaggacggcgtcgtgcaaccctaggaccgacccccaccacccctccccagcctcctgacccttcccagccccctccagggccaatgcagcactaa

SEQ ID NO: 123 - DNA, 2031 bp, Homo sapiens
atgagggtcctgggtgggcgctgcggggcgctgctggcgtgtctcctcctagtgcttcccgtctcagaggcaaactttttgtcaaagcaacaggcttcacaagtcctggttaggaagcgtcgtgcaaattctttacttgaagaaaccaaacagggtaatcttgaaagagaatgcatcgaagaactgtgcaataaagaagaagccagggaggtctttgaaaatgacccggaaacggattatttttatccaaaatacttagtttgtcttcgctcttttcaaactgggttattcactgctgcacgtcagtcaactaatgcttatcctgacctaagaagctgtgtcaatgccattccagaccagtgtagtcctctgccatgcaatgaagatggatatatgagctgcaaagatggaaaagcttcttttacttgcacttgtaaaccaggttggcaaggagaaaagtgtgaatttgacataaatgaatgcaaagatccctcaaatataaatggaggttgcagtcaaatttgtgataatacacctggaagttaccactgttcctgtaaaaatggttttgttatgctttcaaataagaaagattgtaaagatgtggatgaatgctctttgaagccaagcatttgtggcacagctgtgtgcaagaacatcccaggagattttgaatgtgaatgccccgaaggctacagatataatctcaaatcaaagtcttgtgaagatatagatgaatgctctgagaacatgtgtgctcagctttgtgtcaattaccctggaggttacacttgctattgtgatgggaagaaaggattcaaacttgcccaagatcagaagagttgtgaggttgtttcagtgtgccttcccttgaaccttgacacaaagtatgaattactttacttggcggagcagtttgcaggggttgttttatatttaaaatttcgtttgccagaaatcagcagattttcagcagaatttgatttccggacatatgattcagaaggcgtgatactgtacgcagaatctatcgatcactcagcgtggctcctgattgcacttcgtggtggaaagattgaagttcagcttaagaatgaacatacatccaaaatcacaactggaggtgatgttattaataatggtctatggaatatggtgtctgtggaagaattagaacatagtattagcattaaaatagctaaagaagctgtgatggatataaataaacctggacccctttttaagccggaaaatggattgctggaaaccaaagtatactttgcaggattccctcggaaagtggaaagtgaactcattaaaccgattaaccctcgtctagatggatgtatacgaagctggaatttgatgaagcaaggagcttctggaataaaggaaattattcaagaaaaacaaaataagcattgcctggttactgtggagaagggctcctactatcctggttctggaattgctcaatttcacatagattataataatgtatccagtgctgagggttggcatgtaaatgtgaccttgaatattcgtccatccacgggcactggtgttatgcttgccttggtttctggtaacaacacagtgccctttgctgtgtccttggtggactccacctctgaaaaatcacaggatattctgttatctgttgaaaatactgtaatatatcggatacaggccctaagtctatgttccgatcaacaatctcatctggaatttagagtcaacagaaacaatctggagttgtcgacaccacttaaaatagaaaccatctcccatgaagaccttcaaagacaacttgccgtcttggacaaagcaatgaaagcaaaagtggccacatacctgggtggccttccagatgttccattcagtgccacaccagtgaatgccttttataatggctgcatggaagtgaatattaatggtgtacagttggatctggatgaagccatttctaaacataatgatattagagctcactcatgtccatcagtttggaaaaagacaaagaattcttaa

SEQ ID NO: 124 - DNA, 2793 bp, Homo sapiens
atgtgtagcggcagtggccgccggcggagcagtctgagcccgacgatgaggccggggacgggagctgagcgtggaggcctcatgatggggcaccctggcatgcattatgccccaatgggaatgcaccctatgggtcagagagcgaatatgcctcctgtacctcatggaatgatgccgcagatgatgccccctatgggagggccaccaatgggacaaatgcctggaatgatgtcgtcagtaatgcctggaatgatgatgtctcatatgtctcaggcttccatgcagcctgccttaccgccaggagtaaatagtatggatgtagcagcaggtacagcatctggtgcaaaatcaatgtggactgaacataaatcacctgatggaaggacttactactacaacactgaaaccaaacagtctacctgggagaaaccagatgatcttaaaacacctgctgagcaactcttatctaaatgcccctggaaggaatacaaatcagattctggaaagccttactattataattctcaaacaaaagaatctcgctgggccaaacctaaagaacttgaggatcttgaaggataccagaataccattgttgctggaagtcttattacaaaatcaaacctgcatgcaatgatcaaagctgaagaaagcagtaagcaagaagagtgcaccacaacatcaacagccccagtccctacaacagaaattccgaccacaatgagcaccatggctgctgccgaagcagcagctgctgttgttgcagcagcagcagcggcagcagcagcagcagctgcagccaatgctaatgcttccacttctgcttctaatactgtcagtggaactgttccagttgttcctgagcctgaagttacttccattgttgctactgttgtagataatgagaatacagtaactatttcaactgaggaacaagcacaacttactagtacccctgctattcaggatcaaagtgtggaagtatccagtaatactggagaagaaacatctaagcaagaaactgtagctgattttactcccaaaaaagaagaggaggagagccaaccagcaaagaaaacatacacttggaatacaaaggaagaggcaaagcaagcttttaaagaattattgaaagaaaagcgggtaccatcgaatgcttcatgggagcaggctatgaaaatgattattaatgatccacgatacagtgctttggcaaagttaagtgaaaaaaagcaagcctttaatgcctataaagtccagacagaaaaagaagaaaaagaagaagcaagatcaaagtacaaagaggctaaggaatcctttcagcgttttcttgaaaatcatgagaaaatgacttctacaaccagatacaaaaaagcagagcaaatgtttggagagatggaagtttggaatgcaatatcagaacgtgatcgtcttgaaatctatgaagatgttttgttctttctttcaaaaaaagaaaaggaacaagcaaagcagttgcgaaagagaaattgggaagccttaaaaaacatacttgacaacatggctaatgtaacatactctaccacttggtctgaagcccagcagtatctgatggataatccaacttttgcagaagatgaggagttacaaaatatggacaaagaagatgcattaatttgctttgaagaacacattcgggctttagaaaaggaggaagaagaagaaaaacagaagagtttgctgagagaaaggagacgacagcgaaaaaatagggaatctttccagatatttttagatgaattacatgaacatggacaactgcattctatgtcatcttggatggaattgtatccaactattagttctgatattagattcactaatatgcttggtcagcctggatcaactgcacttgatcttttcaagttttatgttgaggatcttaaagcacgttatcatgacgagaagaagataataaaagacattctaaaggataaaggatttgtagttgaagtaaacactacttttgaagattttgtggcgataatcagttcaactaaaagatcaactacattagatgctggaaatatcaaattggctttcaatagtttactagaaaaggcagaagcccgtgaacgtgaaagagaaaaagaagaggctcggaagatgaaacgaaaagaatctgcatttaagagtatgttaaaacaagctgctcctccgatagaattggatgctgtctgggaagatatccgtgagagatttgtaaaagagccagcatttgaggacataactctagaatctgaaagaaaacgaatatttaaagattttatgcatgtgcttgagcatgaatgtcagcatcatcattcaaagaacaagaaacattctaagaaatctaaaaaacatcataggaaacgttcccgctctcgatcggggtcagattcagatgatgatgatagccattcaaagaaaaaaagacagcgatcagagtctcgttctgcttcagaacattcttctagtgcagagtctgagagaagttataaaaagtcaaaaaagcataagaagaaaagtaagaagaggagacataaatctgactctccagaatccgatgctgagcgagagaaggataaaaaagaaaaagatcgggaaagtgaaaaagacagaactagacaaagatcagaatcaaaacacaaatcgcctaagaaaaagactggaaaggattctggtaattgggatacttctggcagcgaactgagtgaaggggaattggaaaagcgcagaagaacccttttggagcaactggatgatgatcaataa

SEQ ID NO: 125 - DNA, 681 bp, Homo sapiens
atgtttacgcttctggttctactcagccaactgcccacagttaccctggggtttcctcattgcgcaagaggtccaaaggcttctaagcatgcgggagaagaagtgtttacatcaaaagaagaagcaaactttttcatacatagacgccttctgtataatagatttgatctggagctcttcactcccggcaacctagaaagagagtgcaatgaagaactttgcaattatgaggaagccagagagatttttgtggatgaagataaaacgattgcattttggcaggaatattcagctaaaggaccaaccacaaaatcagatggcaacagagagaaaatagatgttatgggccttctgactggattaattgctgctggagtatttttggttatttttggattacttggctactatctttgtatcactaagtgtaataggctacaacatccatgctcttcagccgtctatgaaagggggaggcacactccctccatcattttcagaagacctgaggaggctgccttgtctccattgccgccttctgtggaggatgcaggattaccttcttatgaacaggcagtggcgctgaccagaaaacacagtgtttcaccaccaccaccatatcctgggcacacaaaaggatttagggtatttaaaaaatctatgtctctcccatctcactga

SEQ ID NO: 126 - DNA, 795 bp, Homo sapiens
atggaagcgtttttggggtcgcggtccggactttgggcggggggtccggccccaggacagttttaccgcattccgtccactcccgattccttcatggatccggcgtctgcactttacagaggtccaatcacgcggacccagaaccccatggtgaccgggacctcagtcctcggcgttaagttcgagggcggagtggtgattgccgcagacatgctgggatcctacggctccttggctcgtttccgcaacatctctcgcattatgcgagtcaacaacagtaccatgctgggtgcctctggcgactacgctgatttccagtatttgaagcaagttctcggccagatggtgattgatgaggagcttctgggagatggacacagctatagtcctagagctattcattcatggctgaccagggccatgtacagccggcgctcgaagatgaaccctttgtggaacaccatggtcatcggaggctatgctgatggagagagcttcctcggttatgtggacatgcttggtgtagcctatgaagccccttcgctggccactggttatggtgcatacttggctcagcctctgctgcgagaagttctggagaagcagccagtgctaagccagaccgaggcccgcgacttagtagaacgctgcatgcgagtgctgtactaccgagatgcccgttcttacaaccggtttcaaatcgccactgtcaccgaaaaaggtgttgaaatagagggaccattgtctacagagaccaactgggatattgcccacatgatcagtggctttgaatga

SEQ ID NO: 127 - DNA, 1005 bp, Homo sapiens
atgacgcgctcactgttcaagggaaacttttggagtgcagacatcctcagcaccatcggctatgacaacattatccaacatctgaacaatggccgcaagaactgcaaagagtttgaagactttctaaaagaaagggcagcaattgaagagaggtatggcaaagatctgctcaacctctctaggaagaagccgtgtggacagtctgaaatcaacaccctgaagcgggcccttgaagtcttcaagcagcaagtagacaatgtggcacaatgtcacattcagcttgcacagagtttaagagaagaggccaggaagatggaagaattcagggaaaagcaaaaactacaacgaaaaaagacagagctcataatggatgctatccataaacaaaagagcttacaattcaagaaaaccatggatgcaaagaagaactatgagcagaaatgccgggacaaagatgaggcagaacaggccgtcagccggagtgccaacctggtgaacccgaagcaacaagaaaagctttttgtgaaactggcaacttcaaagaccgcagtagaggactcagacaaagcatacatgctgcacatcggcaccctggataaggtccgagaagagtggcagagtgagcacatcaaggcctgcgaggcatttgaggctcaagaatgtgaacgaataaacttcttccggaatgcattgtggttacatgtgaatcagctgtcacaacaatgtgtcaccagtgatgaaatgtacgaacaagtccgaaagagtttagaaatgtgcagcattcagagggacattgaatactttgtgaatcaacgcaaaactggacagattccaccagcacccatcatgtatgagaatttctactcctcccagaagaatgcagtcccagcaggaaaggctacagggcctaacttggcaaggagaggacccctcccaattcctaaaagctcaccagatgatcccaattactctttggttgatgactacagtttgctctatcagtaa

SEQ ID NO: 128 - DNA, 1248 bp, Homo sapiens
atgcccaccaccatcgagcgggagttcgaagagttggatactcagcgtcgctggcagccgctgtacttggaaattcgaaatgagtcccatgactatcctcatagagtggccaagtttccagaaaacagaaatcgaaacagatacagagatgtaagcccatatgatcacagtcgtgttaaactgcaaaatgctgagaatgattatattaatgccagtttagttgacatagaagaggcacaaaggagttacatcttaacacagggtccacttcctaacacatgctgccatttctggcttatggtttggcagcagaagaccaaagcagttgtcatgctgaaccgcattgtggagaaagaatcggttaaatgtgcacagtactggccaacagatgaccaagagatgctgtttaaagaaacaggattcagtgtgaagctcttgtcagaagatgtgaagtcgtattatacagtacatctactacaattagaaaatatcaatagtggtgaaaccagaacaatatctcactttcattatactacctggccagattttggagtccctgaatcaccagcttcatttctcaatttcttgtttaaagtgagagaatctggctccttgaaccctgaccatgggcctgcggtgatccactgtagtgcaggcattgggcgctctggcaccttctctctggtagacacttgtcttgttttgatggaaaaaggagatgatattaacataaaacaagtgttactgaacatgagaaaataccgaatgggtcttattcagaccccagatcaactgagattctcatacatggctataatagaaggagcaaaatgtataaagggagattctagtatacagaaacgatggaaagaactttctaaggaagacttatctcctgcctttgatcattcaccaaacaaaataatgactgaaaaatacaatgggaacagaataggtctagaagaagaaaaactgacaggtgaccgatgtacaggactttcctctaaaatgcaagatacaatggaggagaacagtgagagtgctctacggaaacgtattcgagaggacagaaaggccaccacagctcagaaggtgcagcagatgaaacagaggctaaatgagaatgaacgaaaaagaaaaaggtggttatattggcaacctattctcactaagatggggtttatgtcagtcattttggttggcgcttttgttggctggacactgttttttcagcaaaatgccctataa

SEQ ID NO: 129 - DNA, 1446 bp, Homo sapiens
atggcttataatgacacagacagaaaccagactgagaagctcctaaaaagagtacgagaactggagcaagaggtgcaaagacttaaaaaggaacaggccaaaaataaggaggactcaaacattagagaaaattcagcaggagctggaaaaactaagcgtgcatttgatttcagtgctcatggccgaagacacgtagccctaagaatagcctatatgggctggggataccagggctttgctagtcaggaaaacacaaataataccattgaagagaaactgtttgaagctctaaccaagactcgactagtagaaagcagacagacatccaactatcaccgatgtgggagaacagataaaggagttagtgcctttggacaggtgatctcacttgaccttcgctctcagtttccaaggggcagggattccgaggactttaatgtaaaagaggaggctaatgctgctgctgaagagatccgttatacccacattctcaatcgggtactccctccagacatccgtatattggcctgggcccctgtagaaccaagcttcagtgctaggttcagctgccttgagcggacttaccgctattttttccctcgtgctgatttagatattgtaaccatggattatgcagctcagaagtatgttggcacccatgatttcaggaacttgtgtaaaatggatgtagccaacggtgtgattaattttcagaggactattctatctgctcaagtacagctagtgggccagagcccaggtgaggggagatggcaagaacctttccagttatgtcagtttgaagtgactggccaggcattcctttatcatcaagtccgatgtatgatggctatcctctttctgattggccaaggaatggagaagccagagattattgatgagctgctgaatatagagaaaaatccccaaaagcctcaatatagtatggctgtagaatttcctctagtcttatatgactgtaagtttgaaaatgtcaagtggatctatgaccaggaggctcaggagttcaatattacccacctacaacaactgtgggctaatcatgctgtcaaaactcacatgttgtatagtatgctacaaggactggacactgttccagtaccctgtggaataggaccaaagatggatggaatgacagaatggggaaatgttaagccctctgtcataaagcagaccagtgcctttgtagaaggagtgaagatgcgcacatataagcccctcatggaccgtcctaaatgccaaggactggaatcccggatccagcattttgtacgtaggggacgaattgagcacccacatttattccatgaggaagaaacaaaagccaaaagggactgtaatgacacactagaggaagagaatactaatttggagacaccaacgaagagggtctgtgttgacacagaaattaaaagcatcatttaa

SEQ ID NO: 130 - DNA, 1950 bp, Homo sapiens
atgtccctaatggtctcggctggccggggcctgggggccgtgtggtccccaacccacgtgcaggtgacggtgctgcaggcgcggggcctgcgggccaagggccccgggggcacgagcgacgcgtacgcggtgatccaggtgggcaaggagaagtacgccacctccgtgtcggagcgcagcctgggcgcgcccgtgtggcgcgaggaggccaccttcgagctgccatcgctgctgtcctccggacccgcggccgccgccaccctgcagctcaccgtgctgcaccgcgcgctgctcggcctcgacaagttcctgggccgcgccgaggtggacctgcgggatctgcaccgcgaccagggccgcaggaagacgcagtggtataagttgaaatccaaaccaggaaagaaggacaaggagcgaggagaaattgaggttgacatccagtttatgagaaacaacatgactgccagcatgtttgacctttctatgaaagacaagtctcggaatccatttggaaagctgaaggacaagatcaaggggaagaataaggacagtgggtcagacaccgcctccgccatcatccctagcacgacaccttcggtcgacagtgatgatgagtctgtggttaaagacaagaaaaagaaatcaaagatcaagaccttactttccaagtcaaatttgcagaagacgcctctttcccagtccatgtctgtcctgccgacttcaaagccagaaaaagtgctgcttcgtcccggagactttcagtcccagtgggatgaagatgacaatgaggatgagtcctcctcggcctcggatgtcatgtctcacaagagaacagcgagtacggatcttaagcaactgaaccaggtcaactttacccttcccaagaaggaaggactttcctttcttggtggccttcggtctaagaatgatgtcctttcccgctctaatgtctgcatcaatgggaaccatgtttacctggagcagccagaagccaagggtgagatcaaggatagcagcccgtcctcctccccatcccccaagggcttcagaaagaagcatttgttctcttctacagagaacctggcggctgggtcttggaaggagcctgctgaaggaggtgggctgtcttctgacaggcagctctccgaatcttccaccaaggactccttgaagtctatgaccctgccgtcctaccgacctgccccactggtcagtggggacctcagggaaaacatggcccccgcaaactcagaggccacaaaagaagctaaggagagcaagaagccagagagcaggaggtcctctttgctgtctctgatgacggggaagaaggatgtggctaagggcagtgaaggtgaaaaccctctcacggtcccagggagggagaaggaaggcatgctgatgggggttaagccgggggaggacgcatcggggcctgctgaagaccttgtgagaagatctgagaaagatactgcagctgttgtctccagacagggcagctccctgaacctctttgaagatgtgcagatcacagaaccagaagctgagccagagtccaagtctgaaccgagacctccaatttcctctccgagggctccccagaccagagctgtcaagccccgacttcatcctgtgaagccaatgaatgcaatggccaccaaggttgctaactgcagcttgggaactgccaccatcatcagtgagaacttgaacaatgaggtcatgatgaagaaatacagcccctcggaccctgcatttgcatatgcgcagctgacccacgatgagctgattcagctggtcctcaaacagaaggaaacgataagcaagaaggagttccaggtccgcgagctggaagactacattgacaacctgcttgtcagggtcatggaagaaacccccaatatcctccgcatcccgactcaggttggcaaaaaagcaggaaagatgtaa

SEQ ID NO: 131 - DNA, 2271 bp, Homo sapiens
atggcgtcggccccgccggcctcgcccccgggctcggagccgccggggcccgacccggagccgggcgggccggacgggccgggggcggcacaactggctccgggccctgcggagctacgcctcggagcgcccgtcggcggccccgacccgcagtccccgggcctggatgagcctgcgcccggggccgctgcagatggcggggcgcgttggagcgccgggccggccccggggctggagggaggcccgcgagaccccgggccgtccgccccgccgccgcgctccggcccgcgggggcagcttgcgagccccgacgccccgggcccagggccgcgctccgaagcgccgcttccagaactcgacccgttgttctcctggactgaggagcccgaggagtgtggccccgcgagctgcccggagagcgcgcctttccgcttgcaggggtccagcagcagccaccgagcgcggggcgaggtcgacgtcttctctcccttccccgcgcccacggcgggcgagctggcgctggagcaaggtcccgggtccccgccgcagccctcggacctcagccagacccacccccttccgagcgagcccgtggggagtcaggaggacggcccccgcctccgagccgtgttcgatgccctggacggggatggggacggtttcgtccgcatcgaggacttcatccagtttgctacggtctacggggcagagcaggtgaaggacttaactaagtacttggatcccagtgggctcggcgtgatcagctttgaagacttctaccaagggatcacagccatcagaaacggagatcctgatggccagtgctacggtggtgtcgcttctgcccaagatgaggagcccctggcctgcccggacgagttcgatgacttcgtcacctatgaggccaacgaggtgacggacagcgcgtacatgggctccgagagcacctacagtgagtgtgagaccttcacggacgaggacaccagcaccctggtgcaccctgagctgcaacctgaaggggacgcagacagtgccggcggctcggccgtgccctctgagtgcctggacgccatggaggagcccgaccatggtgccctgctgctgctcccaggcaggcctcacccccatggccagtctgtcatcacggtgatcgggggcgaggagcactttgaggactacggtgaaggcagtgaggcggagctgtccccagagaccctatgcaacgggcagctgggctgcagtgaccccgctttcctcacgcccagtccgacaaagcggctctccagcaagaaggtggcaaggtacctgcaccagtcaggggccctgaccatggaggccctggaggacccttcccccgagctcatggagggcccagaggaggacattgctgacaaggttgtcttcctggaaaggcgtgtgctggagctggaaaaggacacggcagccaccggtgagcaacacagccgcctgaggcaggagaacctgcagctggtgcacagagcaaacgccctggaggagcagctgaaggagcaggagctgagagcctgcgagatggtcctggaagagacccggcgtcagaaggagctcctgtgcaagatggagagggagaagagcattgagatcgagaacctgcagaccaggctacagcaactggacgaggagaacagtgaactccggtcctgcacgccctgtctgaaggccaacattgagcgtctggaggaggagaagcagaagctgttggatgagatagagtcgctgacgctgcggctcagtgaagagcaggagaacaagaggagaatgggggacaggctgagtcacgagaggcaccagttccagagggacaaggaggccacccaggagctgatcgaggacctccgaaagcagctggagcacctgcagctcctcaagctggaggccgagcagcggcggggccgcagcagcagcatgggcctgcaggagtaccacagccgcgcccgggagagcgagctggagcaggaggtccgcaggctgaagcaggacaaccgcaacctgaaggagcagaacgaggagctgaacgggcagatcattaccctcagcatccagggcgccaagagcctcttctccacagccttctctgagtccctggctgcagagatcagctccgtctcccgagatgagctcatggaggcgattcagaagcaggaggagatcaacttccgcctgcaggactacatcgacaggatcatcgtggccatcatggagaccaacccgtccatcctggaggtcaagtag

SEQ ID NO: 132 - DNA, 606 bp, Homo sapiens
atggcaggaaaatcatcactttttaaagtaattctccttggagatggtggagttgggaagagttcacttatgaacagatatgtaactaataagtttgatacccagctcttccatacaataggtgtggaatttttaaataaagatttggaagtggatggacattttgttaccatgcagatttgggacacggcaggtcaggagcgattccgaagcctgaggacaccattttacagaggttctgactgctgcctgcttacttttagtgtcgatgattcacaaagcttccagaacttaagtaactggaagaaagaattcatatattatgcagatgtgaaagagcctgagagctttccttttgtgattctgggtaacaagattgacataagcgaacggcaggtgtctacagaagaagcccaagcttggtgcagggacaacggcgactatccttattttgaaacaagtgcaaaagatgccacaaatgtggcagcagcctttgaggaagcggttcgaagagttcttgctaccgaggataggtcagatcatttgattcagacagacacagtcaatcttcaccgaaagcccaagcctagctcatcttgctgttga

SEQ ID NO: 133 - DNA, 1863 bp, Homo sapiens
atggcggcagcgacggcagacccgggagctgggaacccgcagcctggggactcctccggcgggggcgctgggggcgggctgccgtcccctggggagcaggagctgagccggcgcttgcagcgcctgtatcccgcggtcaaccagcaagagactccgctgccgcgctcctggagccccaaggacaaatacaactacattggtctctcccagggcaacctccgcgtccactacaaaggtcatggcaaaaatcacaaagatgcggcctcagtgcgtgccacccaccccatacctgctgcctgtggcatttattactttgaagtgaagattgtcagcaaaggaagagatggttacatgggaataggactctcggctcaaggcgtcaacatgaacagacttcctggttgggacaaacattcctatggttaccatggtgatgatgggcattcgttctgctcctcggggactggccagccctatggtcccacattcaccacaggagacgtgatcggctgctgtgtcaacctcatcaatggcacctgcttctacaccaagaatggccacagccttggtatagccttcacagacctcccggccaacctctaccccaccgtaggcctgcagacacctggggagattgtggacgccaactttgggcagcagcccttcctgtttgacattgaggactacatgcgggagtggcgtgccaaggtccagggcacggtccactgcttccccatcagtgcccggcttggcgagtggcaggcagtgctgcagaacatggtttcatcttacctcgtgcatcatgggtattgtgccacagccacggcttttgctcgaatgactgaaaccccgattcaggaagaacaggcgtccataaagaacagacaaaagatccagaagctggtgctggagggccgtgtgggcgaggccatcgagaccacccagcgcttctacccagggctgctggagcacaaccccaacctcctcttcatgctcaagtgccggcagtttgtggagatggtgaatgggacggacagtgaggtccgaagtttgagctcccgaagccccaagtcccaggacagctaccctggctcccccagcctcagtccccgacatggccccagtagttcccacatgcacaacacaggagcagacagtcccagctgtagcaatggcgtcgcgtccaccaagagcaaacagaaccacagtaaataccctgcacccagctcctcatcctcgtcctcctcctcctcctcgtcctcttccccatcctccgtcaattactccgagtccaactcaacagactccaccaagtcccagcaccacagcagtaccagtaaccaggagaccagcgacagtgagatggagatggaggcagagcactaccccaacggtgtgctaggaagcatgtccacacgcattgttaatggtgcctacaagcatgaggacctgcagacggatgagtccagcatggatgacaggcatcctcggcggcagctctgcgggggcaaccaggctgccacagaaaggatcattctgtttggccgcgagttgcaggcattgagtgagcagttgggccgggagtacggcaagaatttggcccacacagagatgctgcaggatgccttcagcctgctggcatactcagacccctggagctgcccagttggccagcagcttgaccccatccagagggaacctgtgtgtgctgccctcaacagcgccattttagagtcccagaacctgccaaagcagccccctctgatgctcgccctgggccaggcatctgagtgtctccggctcatggcccgagcaggcctgggttcttgctcctttgccagagttgatgactacttgcactag

SEQ ID NO: 134 - DNA, 1830 bp, Homo sapiens
atggcaggcaccctggacctggacaagggctgcacggtggaggagctgctccgcgggtgcatcgaagccttcgatgactccgggaaggtgcgggacccgcagctggtgcgcatgttcctcatgatgcacccctggtacatcccctcctctcagctggcggccaagctgctccacatctaccaacaatcccggaaggacaactccaattccctgcaggtgaaaacgtgccacctggtcaggtactggatctccgccttcccagcggagtttgacttgaacccggagttggctgagcagatcaaggagctgaaggctctgctagaccaagaagggaaccgacggcacagcagcctaatcgacatagacagcgtccctacctacaagtggaagcggcaggtgactcagcggaaccctgtgggacagaaaaagcgcaagatgtccctgttgtttgaccacctggagcccatggagctggcggagcatctcacctacttggagtatcgctccttctgcaagatcctgtttcaggactatcacagtttcgtgactcatggctgcactgtggacaaccccgtcctggagcggttcatctccctcttcaacagcgtctcacagtgggtgcagctcatgatcctcagcaaacccacagccccgcagcgggccctggtcatcacacactttgtccacgtggcggagaagctgctacagctgcagaacttcaacacgctgatggcagtggtcgggggcctgagccacagctccatctcccgcctcaaggagacccacagccacgttagccctgagaccatcaagctctgggagggtctcacggaactagtgacggcgacaggcaactatggcaactaccggcgtcggctggcagcctgtgtgggcttccgcttcccgatcctgggtgtgcacctcaaggacctggtggccctgcagctggcactgcctgactggctggacccagcccggacccggctcaacggggccaagatgaagcagctctttagcatcctggaggagctggccatggtgaccagcctgcggccaccagtacaggccaaccccgacctgctgagcctgctcacggtgtctctggatcagtatcagacggaggatgagctgtaccagctgtccctgcagcgggagccgcgctccaagtcctcgccaaccagccccacgagttgcaccccaccaccccggcccccggtactggaggagtggacctcggctgccaaacccaagctggatcaggccctcgtggtggagcacatcgagaagatggtggagtctgtgttccggaactttgacgtcgatggggatggccacatctcacaggaagaattccagatcatccgtgggaacttcccttacctcagcgcctttggggacctcgaccagaaccaggatggctgcatcagcagggaggagatggtttcctatttcctgcgctccagctctgtgttgggggggcgcatgggcttcgtacacaacttccaggagagcaactccttgcgccccgtcgcctgccgccactgcaaagccctgatcctgggcatctacaagcagggcctcaaatgccgagcctgtggagtgaactgccacaagcagtgcaaggatcgcctgtcagttgagtgtcggcgcagggcccagagtgtgagcctggaggggtctgcaccctcaccctcacccatgcacagccaccatcaccgcgccttcagcttctctctgccccgccctggcaggcgaggctccaggcctccagagatccgtgaggaggaggtacagacggtggaggatggggtgtttgacatccacttgtaa

SEQ ID NO: 135 - DNA, 2070 bp, Homo sapiens
atgggatcaagtggccttgggaaagcagcaacattagatgaactgctgtgcacttgcattgagatgtttgatgacaatggagagctggataatagttatttgccaagaatagttctactgatgcaccgatggtatttatcttccactgaattggcagaaaaacttctctgcatgtatcgaaatgccactggagaaagctgcaatgaatttcgattaaagatctgctacttcatgaggtactggattctgaagtttcctgcagagtttaatttggatcttggtttgattcgtatgactgaggaatttcgggaagtagctagtcaactaggatatgaaaaacacgtcagcctcatcgacatatccagcattccttcctatgactggatgagaagagtcacacagaggaaaaaagtatccaagaagggaaaagcctgtctgctgtttgaccatctggagcccattgaattggctgagcacctcacttttctggagcataaatcttttagaaggatctcattcactgattaccaaagctatgtcatccatggctgcctggagaataatccaaccttggaaagatcgattgctttatttaatggaatctctaagtgggtccagttgatggttcttagcaaaccaaccccccagcaaagggcagaagtcatcacaaagtttatcaatgttgcaaagaagctccttcagctcaaaaattttaacaccctgatggcagtggtgggaggcctcagtcatagttccatttcacgcctcaaagagacccattctcatctttcttcagaagttacaaagaactggaatgaaatgacagagttggtctcctccaacggcaattactgcaattaccgcaaggcctttgccgactgcgatggcttcaaaatccccatccttggagtacacttgaaagacttgatagctgtccatgtcattttcccagactggacagaggagaacaaagtgaacattgtgaaaatgcaccagctctccgttaccctgagtgaactagtctccctgcagaatgcctctcaccacttagaacccaacatggatttgatcaacctgctcacgctttccctggacctctatcacactgaagatgatatttacaaactgtcactggtgctggagcctagaaattctaaatcgcctacctcccctacgacgcccaacaagcctgtggtacccctggagtgggcattaggggtgatgccaaagccagaccccacggtcatcaacaagcacataaggaaattagtggagtctgtatttagaaactatgatcacgaccatgatgggtacatttcccaagaggactttgaaagtatagctgccaattttcccttcttggattccttctgtgttctggacaaagatcaggatggcctaattagtaaagatgaaatgatggcttacttcctgagagctaaatcccaactacactgtaaaatgggaccaggatttatccataattttcaggagatgacctatctcaagccaaccttctgcgaacactgtgcgggatttctctggggcataatcaagcaaggatacaaatgcaaagactgtggagccaattgtcacaaacagtgcaaagacctcctggttctggcctgcaggagatttgcccgggcgccctccttgagcagtggtcatgggtcactgcctggaagcccctcgctgcccccagcgcaggatgaggtgtttgagttccctggagtcactgctggacacagggatttagacagcagagccatcacactggttacaggctcttctcgcaagatctctgtgaggctacagagggccaccaccagccaggccacccagactgaacctgtctggtcagaggctggctggggggactcggggtcccacaccttccctaaaatgaaatccaagttccatgacaaagcagcaaaggacaaaggctttgccaaatgggaaaatgagaagcccagggtgcatgctggtgtggatgttgtagaccggggcacggagtttgaacttgaccaggatgaaggagaagagaccagacaggatggtgaggatggctga

SEQ ID NO: 136 - DNA, 1122 bp, Homo sapiens
atgttgttgggactggcggccatggagctgaaggtgtgggtggatggcatccagcgtgtggtctgtggggtctcagagcagaccacctgccaggaagtggtcatcgcactagcccaagcaataggccagactggccgctttgtgcttgtgcagcggcttcgggagaaggagcggcagttgctgccacaagagtgtccagtgggcgcccaggccacctgcggacagtttgccagcgatgtccagtttgtcctgaggcgcacaggggccagcctagctgggaggccctcctcagacagctgtccacccccggaacgctgcctaattcgtgccagcctccctgtaaagccacgggctgcgctgggctgtgagccccgcaaaacactgacccccgagccagcccccagcctctcacgccctgggcctgcggcccctgtgacacccacaccaggctgctgcacagacctgcggggcctggagctcagggtgcagaggaatgctgaggagctgggccatgaggccttctgggagcaagagctgcgccgggagcaggcccgggagcgagagggacaggcacgcctgcaggcactaagtgcggccactgctgagcatgccgcccggctgcaggccctggacgctcaggcccgtgccctggaggctgagctgcagctggcagcggaggcccctgggcccccctcacctatggcatctgccactgagcgcctgcaccaggacctggctgttcaggagcggcagagtgcggaggtgcagggcagcctggctctggtgagccgggccctggaggcagcagagcgagccttgcaggctcaggctcaggagctggaggagctgaaccgagagctccgtcagtgcaacctgcagcagttcatccagcagaccggggctgcgctgccaccgcccccacggcctgacaggggccctcctggcactcagggccctctgcctccagccagagaggagtccctcctgggcgctccctctgagtcccatgctggtgcccagcctaggccccgaggtggcccccatgacgcagaactcctggaggtagcagcagctcctgccccagagtggtgtcctctggcagcccagccccaggctctgtga

SEQ ID NO: 137 - DNA, 1752 bp, Homo sapiens
atgccgaaaccaatcaacgtaagagtaactacaatggatgctgagctggaatttgccattcagcccaatacaactggcaaacaactttttgaccaggtggtgaaaacagttggtttgcgtgaggtctggttttttgggctgcagtatgtagacagcaaaggttattctacatggcttaaactaaataaaaaggtaacacagcaggatgttaaaaaagagaatcctttacagttcaagtttagagctaaattctttcctgaagatgtttctgaggaattaattcaagaaataacccagagactcttcttcttgcaagttaaagaagccatcttaaatgatgagatatattgcccgccagaaactgcagttcttttggcttcctatgctgtccaagccaagtatggagattacaataaagagattcataagccaggctacctggctaatgatagactcctaccccagcgtgtattggaacaacacaaactaacaaaagaacagtgggaagaaagaatacagaactggcatgaagaacatagaggaatgttaagggaggattctatgatggaatacctgaagattgcacaagatctagaaatgtatggagtcaactattttgaaataaaaaataaaaaaggaactgaattgtggctaggtgttgatgctttgggtctgaatatttatgagcatgacgacaagttaacacctaaaattggttttccctggagtgaaatcagaaatatttcatttaatgacaaaaaatttgttataaagccaatcgacaaaaaggcacctgattttgtgttttatgcacctcgtctgagaatcaataagcggattttggccttatgtatgggaaaccatgaactatacatgcgaagaaggaagcctgatactattgaagtacaacagatgaaggctcaggctagggaggagaaacatcagaagcagttggaaagggcacaattagagaatgaaaagaagaaaagagaaatagcagaaaaggaaaaggaaagaatagaacgtgaaaaggaagagctaatggaacgtctaaaacaaattgaagagcagacaattaaagctcagaaagaactagaagaacagactcgaaaagctctagaactggatcaagaacgaaaacgagcaaaagaagaagcagaacgacttgaaaaggagcgtcgagctgctgaagaggcaaagtctgccatagcaaaacaagctgccgaccagatgaagaatcaggagcagctagcagcagaacttgctgaattcactgccaagattgcacttctagaggaagccaagaagaaaaaggaagaggaagctactgagtggcaacacaaagcttttgcagcccaggaagacttggaaaagaccaaagaagagttaaaaactgtgatgtctgccccccctccacctccaccaccaccagtcattcctccaacagaaaacgaacatgatgaacacgatgagaataatgctgaagctagtgctgaattatcaaatgaaggggtaatgaaccatagaagcgaggaagaacgtgtaaccgaaacacagaaaaatgagcgtgttaagaagcaacttcaggcattaagttcagaattagcccaagccagagatgaaaccaagaaaacacaaaatgatgttcttcatgctgagaatgttaaagcaggccgtgataagtacaagactctgcgacagattcgacaaggcaatacaaagcagcgtatcgatgagtttgaagcaatgtga

SEQ ID NO: 138 - DNA, 453 bp, Homo sapiens
atggtgctatgctttcctcttcttttactgctgctggttctatggggaccagtgtgtccacttcatgcttggcctaagcgtctcaccaaggctcactggtttgaaattcagcatatacagccaagtcctctccaatgcaacagggcaatgagtggcatcaacaattatacccagcactgtaagcatcaaaatacctttctgcatgactctttccagaatgtggctgctgtctgtgatttgctcagcattgtctgcaaaaatcgtcggcacaactgccaccagagctcaaagcctgtcaacatgactgactgcagactcacttcaggaaagtatccccagtgccgctatagtgctgctgcccagtacaaattcttcattgttgcctgtgacccccctcagaagagcgatcccccctacaagttggttcctgtacacttagatagtattctctaa

SEQ ID NO: 139 - DNA, 1119 bp, Homo sapiens
atgaaggcgggtgccacgtctatgtgggcttcgtgctgtgggctgctgaatgaagtcatgggaactggagctgtcaggggccagcagtcagcatttgcaggagccaccggtccattcagatttacaccaaaccctgagttttccacctacccaccagcagctacggaagggcccaacatagtttgtaaagcctgtgggctttcattttcagtctttagaaagaagcatgtttgctgtgactgcaagaaggatttttgctccgtttgttcagtcttacaagaaaatctccgtagatgttctacttgtcacttattacaagagacagcatttcagcgccctcagttaatgcgactgaaggtgaaggacctgcggcagtatctcattctgagaaatatacccatagatacttgtcgtgagaaagaagacttggtggatctagtactgtgccatcatggactaggctctgaggacgacatggacacaagcagtctgaattcttcaaggtcccagacttctagcttttttacacgttcgtttttttcaaactatacagccccctctgctactatgtcttcgtttcagggagagcttatggatggagaccaaacatccagatctggagtgccggcacaggtacaaagtgaaatcacttcagcaaacacagaagatgatgatgacgacgatgatgaggatgatgatgatgaagaagaaaacgcagaggatcggaaccccgggctctccaaggagagagtgagagcttcactgtctgacttgtcaagccttgatgatgtggaaggaatgagcgtgcgccagctgaaggaaattctggctcggaattttgtcaactattctggctgttgtgaaaaatgggaactggtagagaaagtaaaccggttatacaaagagaatgaagaaaaccaaaagtcctatggcgagcggctgcagctgcaggatgaggaagacgacagcctgtgtcgcatctgcatggatgccgtcatcgactgtgtcctactggagtgtgggcacatggttacctgcaccaagtgcggcaagcgcatgagtgagtgtcccatctgccggcagtatgtggtgcgagccgtgcacgtgttcaagtcctga

SEQ ID NO: 140 - DNA, 813 bp, Homo sapiens
atgtggaacagtggattcgaaagctatggcagctcctcatacgggggagccggcggctacacgcagtccccggggggctttggatcgcccgcaccttctcaagccgaaaagaaatcaagagcccgagcccagcacattgtgccctgtactatatctcagctgctttctgccactttggttgatgaagtgttcagaattgggaatgttgagatttcacaggtcactattgtggggatcatcagacatgcagagaaggctccaaccaacattgtttacaaaatagatgacatgacagctgcacccatggacgttcgccagtgggttgacacagatgacaccagcagtgaaaacactgtggttcctccagaaacatatgtgaaagtggcaggccacctgagatcttttcagaacaaaaagagcctggtagcctttaagatcatgcccctggaggatatgaatgagttcaccacacatattctggaagtgatcaatgcacacatggtactaagcaaagccaacagccagccctcagcagggagagcacctatcagcaatccaggaatgagtgaagcagggaactttggtgggaatagcttcatgccagcaaatggcctcactgtggcccaaaaccaggtgttgaatttgattaaggcttgtccaagacctgaagggttgaactttcaggatctcaagaaccagctgaaacacatgtctgtatcctcaatcaagcaagctgtggattttctgagcaatgaggggcacatctattctactgtggatgatgaccattttaaatccacagatgcagaataa

SEQ ID NO: 141 - DNA, 1449 bp, Homo sapiens
atggcggccgtgtttgatttggatttggagacggaggaaggcagcgagggcgagggcgagccagagctcagccccgcggacgcatgtccccttgccgagttgagggcagctggcctagagcctgtgggacactatgaagaggtggagctgactgagaccagcgtgaacgttggcccagagcgcatcgggccccactgctttgagctgctgcgtgtgctgggcaaggggggctatggcaaggtgttccaggtgcgaaaggtgcaaggcaccaacttgggcaaaatatatgccatgaaagtcctaaggaaggccaaaattgtgcgcaatgccaaggacacagcacacacacgggctgagcggaacattctagagtcagtgaagcacccctttattgtggaactggcctatgccttccagactggtggcaaactctacctcatccttgagtgcctcagtggtggcgagctcttcacgcatctggagcgagagggcatcttcctggaagatacggcctgcttctacctggctgagatcacgctggccctgggccatctccactcccagggcatcatctaccgggacctcaagcccgagaacatcatgctcagcagccagggccacatcaaactgaccgactttggactctgcaaggagtctatccatgagggcgccgtcactcacaccttctgcggcaccattgagtacatggcccctgagattctggtgcgcagtggccacaaccgggctgtggactggtggagcctgggggccctgatgtacgacatgctcactggatcgccgcccttcaccgcagagaaccggaagaaaaccatggataagatcatcaggggcaagctggcactgcccccctacctcaccccagatgcccgggaccttgtcaaaaagtttctgaaacggaatcccagccagcggattgggggtggcccaggggatgctgctgatgtgcagagacatccctttttccggcacatgaattgggacgaccttctggcctggcgtgtggacccccctttcaggccctgtctgcagtcagaggaggacgtgagccagtttgatacccgcttcacacggcagacgccggtggacagtcctgatgacacagccctcagcgagagtgccaaccaggccttcctgggcttcacatacgtggcgccgtctgtcctggacagcatcaaggagggcttctccttccagcccaagctgcgctcacccaggcgcctcaacagtagcccccgggcccccgtcagccccctcaagttctccccttttgaggggtttcggcccagccccagcctgccggagcccacggagctacctctacctccactcctgccaccgccgccgccctcgaccaccgcccctctccccatccgtcccccctcagggaccaagaagtccaagaggggccgtgggcgtccagggcgctag

SEQ ID NO: 142 - DNA, 627 bp, Homo sapiens
atgggcatctctcgggacaactggcacaagcgccgcaaaaccgggggcaagagaaagccctaccacaagaagcggaagtatgagttggggcgcccagctgccaacaccaagattggcccccgccgcatccacacagtccgtgtgcggggaggtaacaagaaataccgtgccctgaggttggacgtggggaatttctcctggggctcagagtgttgtactcgtaaaacaaggatcatcgatgttgtctacaatgcatctaataacgagctggttcgtaccaagaccctggtgaagaattgcatcgtgctcatcgacagcacaccgtaccgacagtggtacgagtcccactatgcgctgcccctgggccgcaagaagggagccaagctgactcctgaggaagaagagattttaaacaaaaaacgatctaaaaaaattcagaagaaatatgatgaaaggaaaaagaatgccaaaatcagcagtctcctggaggagcagttccagcagggcaagcttcttgcgtgcatcgcttcaaggccgggacagtgtggccgagcagatggctatgtgctagagggcaaagagttggagttctatcttaggaaaatcaaggcccgcaaaggcaaataa

SEQ ID NO: 143 - DNA, 279 bp, Homo sapiens
atgacaaaacttgaagagcatctggagggaattgtcaatatcttccaccaatactcagttcggaaggggcattttgacaccctctctaagggtgagctgaagcagctgcttacaaaggagcttgcaaacaccatcaagaatatcaaagataaagctgtcattgatgaaatattccaaggcctggatgctaatcaagatgaacaggtcgactttcaagaattcatatccctggtagccattgcgctgaaggctgcccattaccacacccacaaagagtag

SEQ ID NO: 144 - DNA, 288 bp, Homo sapiens
atgacggaactagagacagccatgggcatgatcatagacgtcttttcccgatattcgggcagcgagggcagcacgcagaccctgaccaagggggagctcaaggtgctgatggagaaggagctaccaggcttcctgcagagtggaaaagacaaggatgccgtggataaattgctcaaggacctggacgccaatggagatgcccaggtggacttcagtgagttcatagtgttcgtggctgcaatcacgtctgcctgtcacaagtactttgagaaggcaggactcaaatga

SEQ ID NO: 145 - DNA, 1143 bp, Homo sapiens
atgctgcgccgcaagccctccaatgccagtgagaaggagcccactcagaagaaaaagctctcccttcagcgctccagcagcttcaaggattttgccaaatccaaacccagctcccccgtggtgagcgagaaggagtttaatctggatgataacattccagaagatgactcaggtgtccccaccccagaagatgctgggaagagtggcaaaaagctggggaagaagtggagggcagtgatttcccgaaccatgaacaggaagatgggcaagatgatggtgaaggccctgtcagaagagatggcagacactctggaggagggctctgcctccccgacatctccagactacagcctggacagccctggccctgagaagatggcgctggccttttctgagcaagaggagcatgaacttccggtgctcagccgccaggcatcaacaggcagtgagctctgcagccccagcccaggttctggcagcttcggggaggaaccacctgccccccagtacacagggcctttctgtggccgggcacgagtccacaccgacttcactcccagcccctatgaccacgactcgctgaaactgcagaaaggagatgtgatccagatcattgaaaagccacctgtgggcacgtggctgggcctactcaatggcaaggtgggctctttcaaattcatctatgtggatgtgctgcccgaggaggccgtggggcatgcccgccccagccgccgacagagcaagggcaagaggcccaagcctaagaccctgcatgagctgctggagcgcatcggcctggaggagcacacatccaccctcctgctcaatggctaccagacactggaagacttcaaagagctgcgagaaacacacctcaatgagctgaacatcatggatccacagcaccgggccaagctgctcacggccgccgagctgctgctggactatgacactggcagtgaggaggctgaagagggcgccgagagcagccaggagccagtggcacacacagtgtcggaacccaaggtggacatcccgcgcgactcaggctgctttgagggctcggagagcgggcgcgatgacgcagagctggcaggcactgaggagcagctgcaaggcctctccctggccggggcaccttga

SEQ ID NO: 146 - DNA, 5682 bp, Homo sapiens
atggcgcggctcgcggactacttcgtgctggtggcgttcgggccgcacccgcgcgggagtggggaaggccagggccagattctgcagcgcttcccagagaaggactgggaggacaacccattcccccagggcatcgagctgttttgccagcccagcgggtggcagctgtgtcccgagaggaatccaccgaccttctttgttgctgtcctcaccgacatcaactccgagcgccactactgcgcctgcttgaccttctgggagccagcggagccttcacaggaaacgacgcgcgtggaggatgccacagagagggaggaagagggggatgagggaggccagacccacctgtctcccacagcacctgccccatctgcccagctgtttgcaccgaagacgctggtactggtgtcgcgactcgaccacacggaggtgttcaggaacagccttggcctcatctatgccatccacgtggagggcctgaatgtgtgcctggagaacgtgattgggaacctgctgacgtgcactgtgcccctggctgggggctcgcagaggacgatctctttgggggctggtgaccggcaggtcatccagactccactggccgactcgctgcccgtcagccgctgcagcgtggccctgctcttccgccagctaggcatcaccaacgtgctgtctttgttctgtgccgccctcacggagcacaaggttctcttcctgtcccggagctaccagcggctcgccgatgcctgtaggggcctcctggcactgctgtttcctctcagatacagcttcacctatgtgcccatcctgccggctcagctgctggaggtcctcagcacacccacgcccttcatcattggggtcaacgcggccttccaggcagagacccaggagctgctcgatgtgattgttgctgatctggatggagggacggtcaccattcctgagtgtgtgcacattccacccttgccagagccactgcagagtcagacgcacagtgtgctgagcatggtcctggacccggagctggagttggctgacctcgccttccctccgcccacgacatccacctcctccctgaagatgcaggacaaggagctgcgcgcggtcttcctgcggctgttcgctcagctgctgcagggctatcgctggtgcctgcacgtcgtgcgcatccacccggagcctgtcatccgcttccataaggcagccttcctgggccagcgtgggctggtagaggacgatttcctgatgaaggtgctggagggcatggcctttgctggctttgtgtcagagcgtggggtcccataccgccctacggacctgttcgatgagctggtggcccacgaggtggcaaggatgcgggcggatgagaaccacccccagcgtgtcctgcgtcacgtccaggaactggcagagcagctctacaagaacgagaacccgtacccagccgtggcgatgcacaaggtacagaggcccggtgagagcagccacctgcgacgggtgccccgacccttcccccggctggatgagggcaccgtgcagtggatcgtggaccaggctgcagccaagatgcagggtgcacccccagctgtgaaggccgagaggaggaccaccgtgccctcagggccccccatgactgccatactggagcggtgcagtgggctgcatgtcaacagcgcccggcggctggaggttgtgcgcaactgcatctcctacgtgtttgaggggaaaatgcttgaggccaagaagctgctcccagccgtgttgagggccctgaaggggcgagctgcccgccgctgcctcgcccaggagctgcacctgcatgtgcagcagaaccgtgcggtcctggaccaccagcagtttgactttgtcgtccgtatgatgaactgctgcctgcaggactgcacttctctggacgagcatggcattgcggcggctctgctgcctctggtcacagccttctgccggaagctgagcccgggggtgacgcagtttgcatacagctgtgtgcaggagcacgtggtgtggagcacgccacagttctgggaggccatgttctatggggatgtgcagactcacatccgggccctctacctggagcccacggaggacctggcccccgcccaggaggttggggaggcaccttcccaggaggacgagcgctctgccctagacgtggcttctgagcagcggcgcttgtggccaactctgagtcgtgagaagcagcaggagctggtgcagaaggaggagagcacggtgttcagccaggccatccactatgccaaccgcatgagctacctcctcctgcccctggacagcagcaagagccgcctacttcgggagcgtgccgggctgggcgacctggagagcgccagcaacagcctggtcaccaacagcatggctggcagtgtggccgagagctatgacacggagagcggcttcgaggatgcagagacctgcgacgtagctggggctgtggtccgcttcatcaaccgctttgtggacaaggtctgcacggagagtggggtcaccagcgaccacctcaaggggctgcatgtcatggtgccagacattgtccagatgcacatcgagaccctggaggccgtgcagcgggagagccggaggctgccgcccatccagaagcccaagctgctgcggccgcgcctgctgccgggtgaggagtgtgtgctggacggcctgcgcgtctacctgctgccggatgggcgtgaggagggcgcggggggcagtgctgggggaccagcattgctcccagctgagggcgccgtcttcctcaccacgtaccgggtcatcttcacggggatgcccacggaccccctggttggggagcaggtggtggtccgctccttcccggtggctgcgctgaccaaggagaagcgcatcagcgtccagacccctgtggaccagctcctgcaggacgggctccagctgcgctcctgcacattccagctgctgaaaatggcctttgacgaggaggtggggtctgacagcgccgagctcttccgtaagcagctgcataagctgcggtacccgccggacatcagggccacctttgcgttcaccttgggctctgcccacacacctggccggccaccgcgagtcaccaaggacaagggtccttccctcagaaccctgtcccggaacctggtcaagaacgccaagaagaccatcgggcggcagcatgtcactcgcaagaagtacaacccccccagctgggagcaccggggccagccgccccctgaggaccaggaggacgagatctcagtgtcggaggagctggagcccagcacgctgaccccgtcctcagccctgaagccctccgaccgcatgaccatgagcagcctggtggaaagggcttgctgtcgcgactaccagcgcctcggtctgggcaccctgagcagcagcctgagccgggccaagtctgagcccttccgcatttctccggtcaaccgcatgtatgccatctgccgcagctacccagggctgctgatcgtgccccagagtgtccaggacaacgccctgcagcgcgtgtcccgctgctaccgccagaaccgcttccccgtggtctgctggcgcagcgggcggtccaaggcggtgctgctgcgctctggaggcctgcatggcaaaggtgtcgtcggcctcttcaaggcccagaacgcaccttctccaggccagtcccaggcggactcgagtagcctggagcaggagaagtacctgcaggctgtggtcagctccatgccccgctacgccgacgcgtcgggacgcaacacgcttagcggcttctcctcagcccacatgggcagtcacgttcccagccccagagccagggtcaccacgctgtccaaccccatggcggcctcggcctccagacggaccgcaccccgaggtaagtggggcagtgtccggaccagtggacgcagcagtggccttggcaccgatgtgggctcccggctagctggcagagacgcgctggccccaccccaggccaacgggggccctcccgacccgggcttcctgcgtccgcagcgagcagccctctatatccttggggacaaagcccagctcaagggtgtgcggtcagaccccctgcagcagtgggagctggtgcccattgaggtattcgaggcacggcaggtgaaggctagcttcaagaagctgctgaaagcatgtgtcccaggctgccccgctgctgagcccagcccagcctccttcctgcgctcactggaggactcagagtggctgatccagatccacaagctgctgcaggtgtctgtgctggtggtggagctcctggattcaggctcctccgtgctggtgggcctggaggatggctgggacatcaccacccaggtggtatccttggtgcagctgctctcagaccccttctaccgcacgctggagggctttcgcctgctggtggagaaggagtggctgtccttcggccatcgcttcagccaccgtggagctcacaccctggccgggcagagcagcggcttcacacccgtcttcctgcagttcctggactgcgtacaccaggtccacctgcagttccccatggagtttgagttcagccagttctacctcaagttcctcggctaccaccatgtgtcccgccgtttccggaccttcctgctcgactctgactatgagcgcattgagctggggctgctgtatgaggagaagggggaacgcaggggccaggtgccgtgcaggtctgtgtgggagtatgtggaccggctgagcaagaggacgcctgtgttccacaattacatgtatgcgcccgaggacgcagaggtcctgcggccctacagcaacgtgtccaacctgaaggtgtgggacttctacactgaggagacgctggccgagggccctccctatgactgggaactggcccaggggccccctgaacccccagaggaagaacggtctgatggaggcgctccccagagcaggcgccgcgtggtgtggccctgttacgacagctgcccgcgggcccagcctgacgccatctcacgcctgctggaggagctgcagaggctggagacagagttgggccaacccgctgagcgctggaaggacacctgggaccgggtgaaggctgcacagcgcctcgagggccggccagacggccgtggcacccctagctccctccttgtgtccaccgcaccccaccaccgtcgctcgctgggtgtgtacctgcaggaggggcccgtgggctccaccctgagcctcagcctggacagcgaccagagtagtggctcaaccacatccggctcccgtcaggctgcccgccgcagcaccagcaccctgtacagccagttccagacagcagagagtgagaacaggtcctacgagggcactctgtacaagaagggggccttcatgaagccttggaaggcccgctggttcgtgctggacaagaccaagcaccagctgcgctactacgaccaccgtgtggacacagagtgcaagggtgtcatcgacttggcggaggtggaggctgtggcacctggcacgcccactatgggtgcccctaagactgtggacgagaaggccttctttgacgtgaagacaacgcgtcgcgtttacaacttctgtgcccaggacgtgccctcggcccagcagtgggtggaccggatccagagctgcctgtcggacgcctga

SEQ ID NO: 147 - DNA, 666 bp, Homo sapiens
atgtggagcgcgggccgcggcggggctgcctggccggtgctgttggggctgctgctggcgctgttagtgccgggcggtggtgccgccaagaccggtgcggagctcgtgacctgcgggtcggtgctgaagctgctcaatacgcaccaccgcgtgcggctgcactcgcacgacatcaaatacggatccggcagcggccagcaatcggtgaccggcgtagaggcgtcggacgacgccaatagctactggcggatccgcggcggctcggagggcgggtgcccgcgcgggtccccggtgcgctgcgggcaggcggtgaggctcacgcatgtgcttacgggcaagaacctgcacacgcaccacttcccgtcgccgctgtccaacaaccaggaggtgagtgcctttggggaagacggcgagggcgacgacctggacctatggacagtgcgctgctctggacagcactgggagcgtgaggctgctgtgcgcttccagcatgtgggcacctctgtgttcctgtcagtcacgggtgagcagtatggaagccccatccgtgggcagcatgaggtccacggcatgcccagtgccaacacgcacaatacgtggaaggccatggaaggcatcttcatcaagcctagtgtggagccctctgcaggtcacgatgaactctga

SEQ ID NO: 148 - DNA, 510 bp, Homo sapiens
atggctgcgctgttgctgagacacgttggtcgtcattgcctccgagcccactttagccctcagctctgtatcagaaatgctgttcctttgggaaccacggccaaagaagagatggagcggttctggaataagaatataggttcaaaccgtcctctgtctccccacattactatctacagttggtctcttcccatggcgatgtccatctgccaccgtggcactggtattgctttgagtgcaggggtctctctttttggcatgtcggccctgttactccctgggaactttgagtcttatttggaacttgtgaagtccctgtgtctggggccagcactgatccacacagctaagtttgcacttgtcttccctctcatgtatcatacctggaatgggatccgacacttgatgtgggacctaggaaaaggcctgaagattccccagctataccagtctggagtggttgtcctggttcttactgtgttgtcctctatggggctggcagccatgtga

SEQ ID NO: 149 - DNA, 945 bp, Homo sapiens
atgttgggtaaaggaggaaaacggaagtttgatgagcatgaagatgggctggaaggcaaaatcgtgtctccctgtgacggtccatccaaggtgtcttacaccttacagcgccagactatcttcaacatttcccttatgaaactctataaccacaggcccctgacagagcccagcttgcaaaagaccgttttaattaacaacatgttgaggcggatccaggaggaactcaaacaggaaggcagcctgaggcccatgttcaccccctcctcccagcccaccaccgagcccagcgacagctaccgagaggccccgccggccttcagccacctggcgtccccgtcctcccacccctgcgacctcggaagcactacgcccctggaggcctgcctcaccccggcctcactgctcgaggacgacgatgacacgttttgcacctcccaggccatgcagcccacggctcccaccaaactgtcacctccagccctcttgccagaaaaggacagtttctcctctgccttggacgagatcgaggagctctgtcccacatctacctccacagaggcggccacggctgcgactgacagtgtgaaagggacctccagcgaggctggcacccagaaactcgacggtcctcaagagagccgcgcagatgactcaaaactgatggactctctgcctgggaattttgaaataacgacgtccacgggtttcctgacagacttgaccctggatgacatcctgtttgctgacattgatacgtccatgtatgattttgacccctgcacttcctcatcagggacagcctcaaaaatggcccctgtgtctgccgacgacctcctcaaaactctggctccttacagcagtcagcctgtcaccccaagtcagcctttcaaaatggacctcacagagctggaccacatcatggaggtgcttgttgggtcctaa

SEQ ID NO: 150 - DNA, 345 bp, Homo sapiens
atggtgatccgtgtatatattgcatcttcctctggctctacagcgattaagaagaaacaacaagatgtgcttggtttcctagaagccaacaaaataggatttgaagaaaaagatattgcagccaatgaagagaatcggaagtggatgagagaaaatgtacctgaaaatagtcgaccagccacaggttaccccctgccacctcagattttcaatgaaagccagtatcgcggggactatgatgccttctttgaagccagagaaaataatgcagtgtatgccttcttaggcttgacagccccacctggttcaaaggaagcagaagtgcaagcaaagcagcaagcatga

SEQ ID NO: 151 - DNA, 1188 bp, Homo sapiens
atggacttcaacatgaagaagctggcgtcggacgcgggcatcttcttcacccgggcggtgcagttcacggaggagaaatttggccaggctgagaagactgagcttgatgcccactttgaaaaccttctggcccgggcagacagcaccaagaactggacagagaagatcttgaggcagacagaggtgctgctgcagcccaaccccagtgcccgagtggaggagttcctgtatgagaagctggacaggaaggtcccctcaagggtcaccaacggggagctgctggctcagtacatggcagacgcggccagtgagctggggccgaccaccccctatgggaagacactgatcaaggtggcagaagctgaaaagcaactgggagccgcggagagggattttatccacacggcctccatcagcttcctcacacccttgcgcaacttcctggagggggactggaagaccatctcgaaggagaggcggctcctccaaaaccggcgtctggacttggatgcctgcaaagcgaggctgaagaaggccaaggctgcagaagccaaagccacgacggtgcctgactttcaggagactagacctcgtaattacattctctcggccagcgcctccgcgctctggaatgatgaagtggacaaggccgagcaggagctccgcgtggcccagacagagtttgaccggcaagcagaagtgacccgtctcttgctggagggaatcagtagcactcacgtgaaccacctgcgctgcctccacgagttcgtcaagtctcagacaacctactacgcacagtgctaccgccacatgctggacttgcagaagcagctgggcagatttcccggcaccttcgtgggcaccacagagcccgcctccccacccctgagcagcacctcacccaccactgctgcggccactatgcctgtggtgccctctgtggccagcctggcccctccgggggaggcctcgctctgcctggaagaggtggccccccctgccagtgggacccgcaaagctcgggtgctctatgactacgaggcagccgacagcagtgagctggccctgctggctgatgagctcatcactgtctacagcctgcctggcatggaccctgactggctcattggcgagagaggcaacaagaagggcaaggtccctgtcacctacttggaactgctcagctag

SEQ ID NO: 152 - DNA, 1008 bp, Homo sapiens
atggctggttccccaacatgcctcaccctcatctatatcctttggcagctcacagggtcagcagcctctggacccgtgaaagagctggtcggttccgttggtggggccgtgactttccccctgaagtccaaagtaaagcaagttgactctattgtctggaccttcaacacaacccctcttgtcaccatacagccagaagggggcactatcatagtgacccaaaatcgtaatagggagagagtagacttcccagatggaggctactccctgaagctcagcaaactgaagaagaatgactcagggatctactatgtggggatatacagctcatcactccagcagccctccacccaggagtacgtgctgcatgtctacgagcacctgtcaaagcctaaagtcaccatgggtctgcagagcaataagaatggcacctgtgtgaccaatctgacatgctgcatggaacatggggaagaggatgtgatttatacctggaaggccctggggcaagcagccaatgagtcccataatgggtccatcctccccatctcctggagatggggagaaagtgatatgaccttcatctgcgttgccaggaaccctgtcagcagaaacttctcaagccccatccttgccaggaagctctgtgaaggtgctgctgatgacccagattcctccatggtcctcctgtgtctcctgttggtgcccctcctgctcagtctctttgtactggggctatttctttggtttctgaagagagagagacaagaagagtacattgaagagaagaagagagtggacatttgtcgggaaactcctaacatatgcccccattctggagagaacacagagtacgacacaatccctcacactaatagaacaatcctaaaggaagatccagcaaatacggtttactccactgtggaaataccgaaaaagatggaaaatccccactcactgctcacgatgccagacacaccaaggctatttgcctatgagaatgttatctag

SEQ ID NO: 153 - DNA, 1686 bp, Homo sapiens
atggtgctgggtcctgaacagaagatgtcagatgacagtgtttctggagatcatggggagtctgccagtcttggtaacatcaaccctgcctatagtaatccctctctttcacagtcccctggggactcagaggagtacttcgccacttactttaatgagaagatctccattcctgaggaggagtactcttgttttagctttcgtaaactctgggctttcaccggaccaggttttcttatgagcattgcctacctggatccaggaaatattgaatccgatttgcagtctggagcagtggctggatttaagttgctctggatccttctgttggccacccttgtggggctgctgctccagcggcttgcagctagactgggagtggttactgggctgcatcttgctgaagtatgtcaccgtcagtatcccaaggtcccacgagtcatcctgtggctgatggtggagttggctatcatcggctcagacatgcaagaagtcattggctcagccattgctatcaatcttctgtctgtaggaagaattcctctgtggggtggcgttctcatcaccattgcagatacttttgtatttctcttcttggacaaatatggcttgcggaagctagaagcattttttggctttctcatcactattatggccctcacatttggatatgagtatgttacagtgaaacccagccagagccaggtactcaagggcatgttcgtaccatcctgttcaggctgtcgcactccacagattgaacaggctgtgggcatcgtgggagctgtcatcatgccacacaacatgtacctgcattctgccttagtcaagtctagacaggtaaaccggaacaataagcaggaagttcgagaagccaataagtactttttcattgaatcctgcattgcactctttgtttccttcatcatcaatgtctttgttgtctcagtctttgctgaagcattttttgggaaaaccaacgagcaggtggttgaagtctgtacaaataccagcagtcctcatgctggcctctttcctaaagataactcgacactggctgtggacatctacaaagggggtgttgtgctgggatgttactttgggcctgctgcactctacatttgggcagtggggatcctggctgcaggacagagctccaccatgacaggaacctattctggccagtttgtcatggagggattcctgaacctaaagtggtcacgctttgcccgagtggttctgactcgctctattgccatcatccccactctgcttgttgctgtcttccaagatgtagagcatctaacagggatgaatgactttctgaatgttctacagagcttacagcttccctttgctctcatacccatcctcacatttacgagcttgcggccagtaatgagtgactttgccaatggactaggctggcggattgcaggaggaatcttggtccttatcatctgttccatcaatatgtactttgtagtggtttatgtccgggacctagggcatgtggcattatatgtggtggctgctgtggtcagcgtggcttatctgggctttgtgttctacttgggttggcaatgtttgattgcactgggcatgtccttcctggactgtgggcatacggtaagcatctctaaaggcctgctgacagaagaagccacccgtggctacgttaaataa

SEQ ID NO: 154 - DNA, 2745 bp, Homo sapiens
atggccagcgagagctcacctctgctggcctaccggctcctgggggaggagggggttgccctccctgccaatggggccgggggtcctggaggggcgtctgcccggaagctgtccaccttcctgggtgtggtggtgcccactgtcctgtccatgttcagcatagttgtttttctgaggattgggttcgtggtgggtcatgctgggctactgcaggccctggccatgctgctggttgcctacttcatcctggcactcaccgtcctctctgtctgtgccatcgccaccaatggagccgtgcaggggggcggagcctacttcatgatcagccgcacactggggcccgaggtcgggggcagcattgggctcatgttctacctggctaacgtctgtggctgtgccgtctccctcctggggctggtggagtctgtgcttgatgtcttcggggccgatgccacagggcccagtgggctccgggtcctgccccagggctacggctggaacctgctgtatggctccctgctgctgggccttgtgggtggggtctgcaccctgggagccggcctctatgcccgggcctcattcctcacattcctgctggtctctggctccctggcctctgtgctcatcagttttgtggctgtggggccgagggacatccgcttgactcctaggcctggccccaatggctcctccctgccgccccggtttggccacttcaccggcttcaacagcagtaccctgaaggacaacttgggcgctggctatgctgaggactacaccacgggagccgtgatgaattttgccagcgtctttgctgtcctctttaacggctgtacaggcatcatggctggggccaacatgtcaggggagctgaaggaccccagccgggcgatccctctgggcacgatcgtcgccgtcgcctacaccttcttcgtctatgtcctgcttttctttctctccagcttcacttgtgacaggaccctgctgcaggaagactatgggttcttccgcgccatcagcctgtggcccccactggtgttgatcggaatctatgccacagcgctctcagcgtccatgagctcgctcattggtgcctcccgcatcctccatgccctggcccgggatgacctctttggcgtgatcttggcaccggccaaggttgtgtcccgagggggaaacccctgggcagctgtactttattcttggggcctggtgcagctggtgctcctggctgggaagctgaacacactggctgctgtggtcactgtcttctacctggtggcctatgctgccgtggacctgtcctgcctgagcctggagtgggcctcggcccccaacttccgccccaccttcagcctgttctcctggcacacctgcctgctgggggtggcctcctgcctgctcatgatgttcctcatcagtcctggcgcggctggtggctccctgctcctcatgggtctgctggctgccctgctcaccgcgcgaggaggccccagtagctggggctatgtcagccaggccttgcttttccaccaggtgcgtaagtatctgcttcggctggacgtccggaaggatcacgtgaagttctggcggccccagctgctgctcctggtggggaacccccggggcgccctgcctctgctgcggttggccaaccagcttaagaagggggggctgtatgtgctgggccacgtcaccctgggagacctcgactccctgccctcggaccctgtacagccgcagtatggggcatggctcagcctggtggaccgtgcccaggtgaaggcttttgtggatctaaccctctcaccctccgtgcgccagggggctcagcatctgctgcgaatctccggcctcggtggcatgaagcccaacacgttggtcctaggtttctacgatgacgctccaccgcaggaccatttcctgacggacccggctttctctgagcctgcagacagcaccagggagggcagttccccagctctgagcaccctgttccctcctccccgggctcctgggagcccccgggccctcaatccccaggactatgtggccacggtggccgacgccctcaagatgaacaagaatgtggtgctggcccgggccagcggggccttgccccctgagcggctgagccgggggtctgggggcacctctcagctgcaccatgtggacgtgtggcccctcaacctgctgcggccccggggtgggcccggctatgtggatgtctgcggcctcttcctgctgcagatggcaaccatcttgggcatggtgcccgcttggcatagcgcccggctccggatcttcctgtgcctggggcctcgggaggcgcctggggcggccgaggggcggctgcgggcactgctgagccaactgaggatccgggctgaggtgcaggaggtggtgtggggcgagggggccggggctggggaacccgaggcggaggaggaaggggactttgtgaacagtgggcggggagacgcagaggcagaggccctggcacgcagcgccaacgccctggttcgggcccagcaggggcgcggcacaggaggagggccgggtgggccggagggtggggatgctgagggccccatcacagccctcaccttcctgtacttgcctcggccgccagccgatcccgcccgatacccccgctacctggcgctactggagactctaacccgagacctgggccccacgctgctggttcatggggtcactccagtcacctgcactgatctgtga

SEQ ID NO: 155 - DNA, 1017 bp, Homo sapiens
atggagctgcgcagcgggagcgtgggcagccaggcggtggcgcggaggatggatggggacagccgagatggcggcggcggcaaggacgccaccgggtcggaggactacgagaacctgccgactagcgcctccgtgtccacccacatgacagcaggagcgatggccgggatcctggagcactcggtcatgtacccggtggactcggtgaagacacgaatgcagagtttgagtccagatcccaaagcccagtacacaagtatctacggagccctcaagaaaatcatgcggaccgaaggcttctggaggcccttgcgaggcgtcaacgtcatgatcatgggtgcagggccggcccatgccatgtattttgcctgctatgaaaacatgaaaaggactttaaatgacgttttccaccaccaaggaaacagccacctagccaacgggatagctgggagtatggccaccctgctccacgatgcggtaatgaatccagcagaagtggtgaagcagcgcttgcagatgtacaactcgcagcaccggtcagcaatcagctgcatccggacggtgtggaggaccgaggggttgggggccttctaccggagctacaccacgcagctgaccatgaacatccccttccagtccatccacttcatcacctatgagttcctgcaggagcaggtcaacccccaccggacctacaacccgcagtcccacatcatctcaggcgggctggccggggccctcgccgcggccgccacgacccccctggacgtctgtaagacccttctgaacactcaggagaacgtggccctctcgctggccaacatcagcggccggctgtcgggtatggccaatgccttccggacggtgtaccagctcaacggcctggccggctacttcaaaggcatccaggcgcgtgtcatctaccagatgccctccaccgccatttcttggtctgtctatgagttcttcaagtactttctcaccaagcgccagctggaaaatcgagctccatactaa

SEQ ID NO: 156 - DNA, 1491 bp, Homo sapiens
atggggacacagaaggtcaccccagctctgatatttgccatcacagttgctacaatcggctctttccaatttggctacaacactggggtcatcaatgctcctgagaagatcataaaggaatttatcaataaaactttgacggacaagggaaatgccccaccctctgaggtgctgctcacgtctctctggtccttgtctgtggccatattttccgtcgggggtatgatcggctccttttccgtcggactcttcgtcaaccgctttggcaggcgcaattcaatgctgattgtcaacctgttggctgtcactggtggctgctttatgggactgtgtaaagtagctaagtcggttgaaatgctgatcctgggtcgcttggttattggcctcttctgcggactctgcacaggttttgtgcccatgtacattggagagatctcgcctactgccctgcggggtgcctttggcactctcaaccagctgggcatcgttgttggaattctggtggcccagatctttggtctggaattcatccttgggtctgaagagctatggccgctgctactgggttttaccatccttcctgctatcctacaaagtgcagcccttccattttgccctgaaagtcccagatttttgctcattaacagaaaagaagaggagaatgctaagcagatcctccagcggttgtggggcacccaggatgtatcccaagacatccaggagatgaaagatgagagtgcaaggatgtcacaagaaaagcaagtcaccgtgctagagctctttagagtgtccagctaccgacagcccatcatcatttccattgtgctccagctctctcagcagctctctgggatcaatgctgtgttctattactcaacaggaatcttcaaggatgcaggtgttcaagagcccatctatgccaccatcggcgcgggtgtggttaatactatcttcactgtagtttctctatttctggtggaaagggcaggaagaaggactctgcatatgataggccttggagggatggctttttgttccacgctcatgactgtttctttgttattaaaggataactataatgggatgagctttgtctgtattggggctatcttggtctttgtagccttctttgaaattggaccaggccccattccctggtttattgtggccgaactcttcagccagggcccccgcccagctgcgatggcagtggccggctgctccaactggacctccaacttcctagtcggattgctcttcccctccgctgctcactatttaggagcctacgtttttattatcttcaccggcttcctcattaccttcttggcttttaccttcttcaaagtccctgagacccgtggcaggacttttgaggatatcacacgggcctttgaagggcaggcacacggtgcagatagatctggaaaggacggcgtcatggagatgaacagcatcgagcctgctaaggagaccaccaccaatgtctaa

SEQ ID NO: 157 - DNA, 1383 bp, Homo sapiens
atggccccgggtcgcgcggtggccgggctcctgttgctggcggccgccggcctcggaggagtggcggaggggccagggctagccttcagcgaggatgtgctgagcgtgttcggcgcgaatctgagcctgtcggcggcgcagctccagcacttgctggagcagatgggagccgcctcccgcgtgggcgtcccggagcctggccagctgcacttcaaccagtgtttaactgctgaagagatcttttcccttcatggcttttcaaatgctacccaaataaccagctccaaattctctgtcatctgtccagcagtcttacagcaattgaactttcacccatgtgaggatcggcccaagcacaaaacaagaccaagtcattcagaagtttggggatatggattcctgtcagtgacgattattaatctggcatctctcctcggattgattttgactccactgataaagaaatcttatttcccaaagattttgaccttttttgtggggctggctattgggactcttttttcaaatgcaattttccaacttattccagaggcatttggatttgatcccaaagtcgacagttatgttgagaaggcagttgctgtgtttggtggattttacctacttttcttttttgaaagaatgctaaagatgttattaaagacatatggtcagaatggtcatacccactttggaaatgataactttggtcctcaagaaaaaactcatcaacctaaagcattacctgccatcaatggtgtgacatgctatgcaaatcctgctgtcacagaagctaatggacatatccattttgataatgtcagtgtggtatctctacaggatggaaaaaaagagccaagttcatgtacctgtttgaaggggcccaaactgtcagaaatagggacgattgcctggatgataacgctctgcgatgccctccacaatttcatcgatggcctggcgattggggcttcctgcaccttgtctctccttcagggactcagtacttccatagcaatcctatgtgaggagtttccccacgagttaggagactttgtgatcctactcaatgcagggatgagcactcgacaagccttgctattcaacttcctttctgcatgttcctgctatgttgggctagcttttggcattttggtgggcaacaatttcgctccaaatattatatttgcacttgctggaggcatgttcctctatatttctctggcagatatgtttccagagatgaatgatatgctgagagaaaaggtaactggaagaaaaaccgatttcaccttcttcatgattcagaatgctggaatgttaactggattcacagccattctactcattaccttgtatgcaggagaaatcgaattggagtaa

SEQ ID NO: 158 - DNA, 1077 bp, Homo sapiens
atgagcgcggacgcagcggccggggcgcccctgccccggctctgctgcctggagaagggtccgaacggctacggcttccacctgcacggggagaagggcaagttgggccagtacatccggctggtggagcccggctcgccggccgagaaggcggggctgctggcgggggaccggctggtggaggtgaacggcgaaaacgtggagaaggagacccaccagcaggtggtgagccgcatccgcgccgcactcaacgccgtgcgcctgctggtggtcgaccccgagacggacgagcagctgcagaagctcggcgtccaggtccgagaggagctgctgcgcgcccaggaagcgccggggcaggccgagccgccggccgccgccgaggtgcagggggctggcaacgaaaatgagcctcgcgaggccgacaagagccacccggagcagcgcgagcttcggcctcggctctgtaccatgaagaagggccccagtggctatggcttcaacctgcacagcgacaagtccaagccaggccagttcatccggtcagtggacccagactccccggctgaggcttcagggctccgggcccaggatcgcattgtggaggtgaacggggtctgcatggaggggaagcagcatggggacgtggtgtccgccatcagggctggcggggacgagaccaagctgctggtggtggacagggaaactgacgagttcttcaagaaatgcagagtgatcccatctcaggagcacctgaatggtcccctgcctgtgcccttcaccaatggggagatacagaaggagaacagtcgtgaagccctggcagaggcagccttggagagccccaggccagccctggtgagatccgcctccagtgacaccagcgaggagctgaattcccaagacagccccccaaaacaggactccacagcgccctcgtctacctcctcctccgaccccatcctagacttcaacatctccctggccatggccaaagagagggcccaccagaaacgcagcagcaaacgggccccgcagatggactggagcaagaaaaacgaactcttcagcaacctctga

SEQ ID NO: 159 - DNA, 1107 bp, Homo sapiens
atggggactcctcccggcctgcagaccgactgcgaggcgctgctcagccgcttccaggagacggacagtgtacgcttcgaggacttcacggagctctggagaaacatgaagttcgggactatcttctgtggcagaatgagaaatttagaaaagaacatgtttacaaaagaagctttagctttggcttggcgatattttttacctccatacaccttccagatcagagttggtgctttgtatctgctatatggattatataatacccaactgtgtcaaccaaaacaaaagatcagagttgccctgaaggattgggatgaagttttaaaatttcagcaagatttagtaaatgcacagcattttgatgcagcttatatttttaggaagctacgactagacagagcatttcactttacagcaatgcccaaattgctgtcatataggatgaagaaaaaaattcaccgagctgaagttacagaagaatttaaggacccaagtgatcgtgtgatgaaacttatcacttctgatgtattagaggaaatgctgaatgttcatgatcattatcagaacatgaaacatgtaatttcagttgataagtccaagccagataaagccctcagcttgataaaggatgatttttttgacaatattaagaacatagttttggagcatcagcagtggcacaaagacagaaagaatccatccttaaagtcaaaaactaatgatggagaagaaaaaatggaaggaaattcacaagaaacggagagatgtgaaagggcagaatcattagcgaaaataaaatcaaaggccttttcagttgtcatacaggcatccaaatcaagaaggcatcgtcaagtcaaactcgactcttctgactctgattctgcatctggtcaagggcaagtcaaagcaactaggaaaaaagagaagaaagaaagattgaaaccagcaggaaggaagatgtctctcagaaacaaaggcaatgtgcagaatatacacaaggaagataaacctttaagtctgagtatgcctgtaattacagaagaagaagagaatgaaagtttgagtggaacagagttcactgcatccaagaagaggagaaaacactga

SEQ ID NO: 160 - DNA, 2496 bp, Homo sapiens
atggagcggccctggggagctgcggacggcctctcgcgctggccccatggcctcggcctcctcctcctcctgcagctgctgccgccgtcgaccctcagccaggaccggctggacgcgccgccgccgcccgctgcgccgctgccgcgctggtctggccccatcggggtgagctgggggctgcgggcggccgcagccgggggcgcgtttccccgcggcggccgttggcgtcgcagcgcgccgggcgaggacgaggagtgcggccgggtccgggacttcgtcgccaagctggccaacaacacgcaccagcatgtgtttgatgatctcagaggctcagtatccttgtcctgggttggagatagcactggggtcattctagtcttgactaccttccatgtaccactggtaattatgacttttggacagtccaagctatatcgaagtgaggattatgggaagaactttaaggatattacagatctcatcaataacacctttattcggactgaatttggcatggctattggtcctgagaactctggaaaggtggtgttaacagcagaggtgtctggaggaagtcgtggaggaagaatctttagatcatcagattttgcgaagaattttgtgcaaacagatctcccttttcatcctctcactcagatgatgtatagccctcagaattctgattatcttttagctctcagcactgaaaatggcctgtgggtgtccaagaattttgggggaaaatgggaagaaatccacaaagcagtatgtttggccaaatggggatcagacaacaccatcttctttacaacctatgcaaatggctcctgcaaagctgaccttggggctctggaattatggagaacttcagacttgggaaaaagcttcaaaactattggtgtgaaaatctactcatttggtcttgggggacgtttcctttttgcctctgtgatggctgataaggatacaacaagaaggatccacgtttcaacagatcaaggggacacatggagcatggcccagctcccctccgtgggacaggaacagttctattctattctggcagcaaatgatgacatggtattcatgcatgtagatgaacctggagacactgggtttggcacaatctttacctcagatgatcgaggcattgtctattccaagtctttggaccgacatctctacactaccacaggcggagagacggactttaccaacgtgacctccctccgcggcgtctacataacaagcgtgctctccgaagataattctatccagaccatgatcacttttgaccaaggaggaaggtggacgcacctgaggaagcctgaaaacagtgaatgtgatgctacagcaaaaaacaagaatgagtgcagccttcatattcatgcttcctacagcatctcccagaaactgaatgttccaatggccccactctcagagccgaatgccgtaggcattgtcattgctcatggtagcgtgggggatgccatctcagtgatggttccagatgtgtacatctcagatgatgggggttactcctggacaaagatgctggaaggaccccactattacaccatcctggattctggaggcatcattgtggccattgagcacagcagccgtcctatcaatgtgattaagttctccacagacgaaggtcaatgctggcaaacctacacgttcaccagggaccccatctatttcactggcctagcttcagaacctggagctaggtccatgaatatcagcatttggggcttcacagaatctttcctgaccagccagtgggtctcctacaccattgattttaaagatatccttgaaaggaactgtgaagagaaggactataccatatggctggcacactccacagaccctgaagattatgaagatggctgcattttgggctacaaagaacagtttctgcggctacgcaagtcatccgtgtgtcagaatggtcgagactatgttgtgaccaagcagccctccatctgcctctgttccctggaggactttctctgtgattttggctactaccgtccagaaaatgactccaagtgtgtggaacagccagaactgaagggccacgacctggagttttgtctgtacggaagagaagaacacctaacaacaaatgggtaccggaaaattccaggggacaaatgccagggtggggtaaatccagttcgagaagtaaaagacttgaaaaagaaatgcacaagcaactttttgagtccggaaaaacagaattccaagtcaaattctgttccaattatcctggccatcgtgggattgatgctggtcacagtcgtagcaggagtgctcattgtgaagaaatatgtctgtgggggaaggttcctggtgcatcgatactctgtgctgcagcagcatgcagaggccaatggtgtggatggtgtggatgctttggacacagcctcccacactaataaaagtggttatcatgatgactcagatgaggacctcttggaatag

SEQ ID NO: 161 - DNA, 1086 bp, Homo sapiens
atgtacggcaaaggcaagagtaacagcagcgccgtcccgtccgacagccaggcccgggagaagttagcactctacgtatatgaatatctgctccatgtaggagctcagaaatcagctcaaacatttttatcagagataagatgggaaaaaaacatcacattgggggaaccaccaggattcttacattcttggtggtgtgtattttgggatctctactgtgcagctccagagagacgtgaaacatgtgaacactcaagtgaagcaaaagccttccatgattacagtgctgcagcagctcccagtccagtgctaggaaacattcccccaggagatggcatgccagtaggtcctgtaccaccagggttctttcagccttttatgtcacctcggtaccctggaggtccaaggcccccattgaggatacctaatcaggcacttggaggtgtcccaggaagtcagccattactccccagtggaatggatccaactcgacaacaaggacatccaaatatgggtgggccaatgcagagaatgactcctccaagaggaatggtgcccttaggaccacagaactatggaggtgcaatgagacccccactgaatgctttaggtggccctggaatgcctggaatgaacatgggtccaggtggtggtagaccttggccaaacccaacaaatgccaattcaataccatactcctcagcatctcctgggaattatgtaggtcctccaggaggtggagggccaccaggaacacccatcatgcctagtccagcagattcaaccaactctggtgataacatgtatactttaatgaatgcagtacctcctggacctaacagacctaattttccaatgggtcctgggtcagatggtcccatgggtggattaggaggaatggagtcacatcacatgaatggctctttaggctcaggagatatggacagtatttccaagaattctcccaataatatgagcctgagtaatcaaccgggcactccaagggatgatggcgaaatggggggaaatttcttaaatccttttcagagtgagagttactcccctagcatgacaatgagcgtgtga

SEQ ID NO: 162 - DNA, 1257 bp, Homo sapiens
atgcggacgaaggcggcgggctgcgcggagcggcgtcccctgcagccgcggaccgaggcagcggcggcacctgccggccgagcaatgccaagtgagtacacctatgtgaaactgagaagtgattgctcgaggccttccctgcaatggtacacccgagctcaaagcaagatgagaaggcccagcttgttattaaaagacatcctcaaatgtacattgcttgtgtttggagtgtggatcctttatatcctcaagttaaattatactactgaagaatgtgacatgaaaaaaatgcattatgtggaccctgaccatgtaaagagagctcagaaatatgctcagcaagtcttgcagaaggaatgtcgtcccaagtttgccaagacatcaatggcgctgttatttgagcacaggtatagcgtggacttactcccttttgtgcagaaggcccccaaagacagtgaagctgagtccaagtacgatcctccttttgggttccggaagttctccagtaaagtccagaccctcttggaactcttgccagagcacgacctccctgaacacttgaaagccaagacctgtcggcgctgtgtggttattggaagcggaggaatactgcacggattagaactgggccacaccctgaaccagttcgatgttgtgataaggttaaacagtgcaccagttgagggatattcagaacatgttggaaataaaactactataaggatgacttatccagagggcgcaccactgtctgaccttgaatattattccaatgacttatttgttgctgttttatttaagagtgttgatttcaactggcttcaagcaatggtaaaaaaggaaaccctgccattctgggtacgactcttcttttggaagcaggtggcagaaaaaatcccactgcagccaaaacatttcaggattttgaatccagttatcatcaaagagactgcctttgacatccttcagtactcagagcctcagtcaaggttctggggccgagataagaacgtccccacaatcggtgtcattgccgttgtcttagccacacatctgtgcgatgaagtcagtttggcgggttttggatatgacctcaatcaacccagaacacctttgcactacttcgacagtcaatgcatggctgctatgaactttcagaccatgcataatgtgacaacggaaaccaagttcctcttaaagctggtcaaagagggagtggtgaaagatctcagtggaggcattgatcgtgaattttga

SEQ ID NO: 163 - DNA, 996 bp, Homo sapiens
atgagagggtatcttgtggccatattcctgagtgctgtcttcctctattatgtactgcattgcatattatggggaacgaatgtctattgggtggcacctgtggaaatgaaacggagaaataagatccagccttgtttatcaaagccagcttttgcctctctgctgaggtttcatcagtttcacccttttctgtgtgcggctgattttagaaagattgcttccttgtatggtagcgataagtttgatttgccctatgggatgagaacatcagcggaatattttcgacttgctctttcaaaactgcagagttgtgatctctttgatgagtttgacaacataccctgtaaaaagtgtgtggtggttggtaatggaggagttttgaagaataagacattaggagaaaaaatcgactcctatgatgtaataataagaatgaataatggtcctgttttaggacatgaagaagaagttgggagaaggacaaccttccgacttttttatccagaatctgttttttcagatcctattcacaatgaccctaatacgacagtgattctcactgcttttaagccacatgatttaaggtggctgttggaattgttgatgggtgacaaaataaacactaatggtttttggaagaaaccagccttaaacctgatttataaaccttatcaaatccgaatattagatcctttcattatcagaacagcagcttatgaactgcttcattttccaaaagtgtttcccaaaaatcagaaacctaaacacccaacaacaggaattattgccatcacattggcgttttacatatgtcacgaagttcacctagctggttttaaatacaacttttctgacctcaagagtcctttgcactactatgggaatgccaccatgtctttgatgaataagaacgcgtatcacaatgtgactgcagagcagctctttttgaaggacattatagaaaaaaacctcgtaatcaacttgactcaagattga

SEQ ID NO: 164 - DNA, 1398 bp, Homo sapiens
atggcaatgacaggctcaacaccttgctcatccatgagtaaccacacaaaggaaagggtgacaatgaccaaagtgacactggagaatttttatagcaaccttatcgctcaacatgaagaacgagaaatgagacaaaagaagttagaaaaggtgatggaagaagaaggcctaaaagatgaggagaaacgactccggagatcagcacatgctcggaaggaaacagagtttcttcgtttgaagagaacaagacttggattggaagattttgagtccttaaaagtaataggcagaggagcatttggtgaggtacggcttgttcagaagaaagatacgggacatgtgtatgcaatgaaaatactccgtaaagcagatatgcttgaaaaagagcaggttggccacattcgtgcggagcgtgacattctagtggaggcagacagtttgtgggttgtgaaaatgttctatagttttcaggataagctaaacctctacctaatcatggagttcctgcctggaggggacatgatgaccttgttgatgaaaaaagacactctgacagaagaggagactcagttttatatagcagaaacagtattagccatagactctattcaccaacttggattcatccacagagacatcaaaccagacaaccttcttttggacagcaagggccatgtgaaactttctgactttggtctttgcacaggactgaaaaaagcacataggacagaattttataggaatctgaaccacagcctccccagtgatttcactttccagaacatgaattccaaaaggaaagcagaaacctggaaaagaaatagacgtcagctagccttctccacagtaggcactcctgactacattgctcctgaggtgttcatgcagaccgggtacaacaagctctgtgattggtggtcgcttggggtgatcatgtatgagatgctcatcggctacccacctttctgttctgagacccctcaagagacatataagaaggtgatgaactggaaagaaactttgacttttcctccagaagttcccatctctgagaaagccaaggatctaattttgaggttctgctgtgaatgggaacatagaattggagctcctggagttgaggaaataaaaagtaactctttttttgaaggcgttgactgggaacatatcagagagagacctgctgcaatatctattgaaatcaaaagcattgatgatacctcaaacttcgatgagtttccagaatctgatattcttaagccaacagtggccacaagtaatcatcctgagactgactacaagaacaaagactgggtcttcatcaattacacgtacaagcgctttgagggcctgactgcaaggggggcaataccttcctacatgaaagcagcaaaatag

SEQ ID NO: 165 - DNA, 20658 bp, Homo sapiens
atggcatctagtcctgagcttcccaccgaagatgaacagggttcctggggcatcgacgatctccatatttcattgcaagctgaacaggaagacacccagaagaaagccttcacgtgctggataaactcacagttggccaggcacacttctccctcagttatatccgacctattcacagacattaaaaaggggcatgtcctcctggatctgctagaagtactttctgggcaacagttgcctcgggataaaggatctaataccttccagtgtagaatcaatatagaacatgccttgacattcctaagaaaccgatcaattaagctaataaatattcatgttactgatatcattgatggaaacccatccattatccttggcctaatttggacaattatcctgcactttcatattgagaagcttgcccagactctttcttgcaattacaatcagccttccctggatgatgtgagtgtggttgactcatctcctgcctcaagtcctccagctaagaaatgctctaaagtgcaagcaagatggcaaatgtctgcaagaaaggcccttcttttgtgggctcaggaacaatgcgccacctatgagtctgtcaatgtgaccgattttaagtcaagttggagaaatgggatggcttttttggccatcattcatgccttgcgaccagacctaattgacatgaagagtgtgaagcatagatccaacaaagacaatctgagagaggccttcagaattgcagaacaagaattaaaaatccccagattgctggaaccagaagatgtggatgttgttgatcctgatgaaaagtccatcatgacctatgtggcacagtttctgcagtattccaaagatgcccctgggactggagaggaggctcagggaaaggtgaaagatgctatgggctggttaactctgcaaaaggaaaaactacagaagttgctaaaggattcagagaatgatacctactttaaaaagtataatagcctgctgtcctttatggagtcattcaatgaagaaaaaaagtcctttttggatgtcctgtcaataaaacgggatctggatgagctggacaaggatcatttacagttgagagaagcctgggatggcctcgatcaccagattaatgcatggaaaataaagctaaattatgccttgcccccacccctccatcaaactgaagcttggctccaggaggtagaagagcttatggatgaagatttgtcagcctcccaggatcactctcaagccgtgactctgatacaagagaaaatgactttattcaagagcctgatggatagatttgagcatcattcgaacattctccttacctttgaaaataaggatgaaaatcacttgccattggtaccacctaacaaattggaggaaatgaaaagacgaatcaacaacattttggagaaaaaatttattctacttctagaatttcattactacaagtgcttagttcttggtttggtagatgaagtgaaatcaaaattggatatttggaacattaaatatgggagcagagaatctgtggaattattgctggaagactggcataaatttattgaagaaaaagaattcctagctcgacttgatacttcttttcaaaaatgtggagaaatttataagaatttggctggagaatgtcagaatattaataaacagtatatgatggtgaaatctgatgtttgtatgtatagaaaaaatatatataatgtgaagtccactctacaaaaagtgctggcatgttgggctacttatgtggaaaaccttcgcttactaagggcttgctttgaggagacaaagaaggaagaaattaaagaggtaccctttgagacactagcccagtggaatctagaacacgctactttaaatgaagcaggaaatttcttagtcgaagtcagcaatgatgtggttggatcatctatttctaaagaactgagaaggctgaataaaagatggagaaagttggtttcaaaaactcaacttgaaatgaacctgccactgatgataaaaaaacaggatcagcccacttttgacaattctggaaatattctatctaaagaagagaaagcaactgttgagttttcaacagatatgtcagtagaacttcctgaaaattataatcaaaatataaaggctggagagaaacatgaaaaagaaaatgaagaattcacagggcaactaaaagtggctaaagatgttgaaaaactcattggacaagtggaaatctgggaggcagaagccaaatctgttttggatcaagatgatgtggacacctcaatggaagaatctttgaagcatcttattgccaaaggctctatgtttgatgagcttatggcaagaagtgaagatatgttacaaatggatatacaaaatatttcaagccaggagtcctttcaacatgttctcacaactgggcttcaggcaaagattcaagaagctaaagagaaagtccagatcaatgtggtaaaactcattgcagcgttgaagaacttaactgacgtttcaccagatttggacatcaggctgaagatggaagaatcccagaaggaacttgaatcatatatgatgagggctcagcagttactggggcaaagagagagccccggtgaactcatttcaaaacacaaggaagcactaataatttctaatacaaaaagtctggccaagtatttgaaagctgttgaagaactaaaaaataatgtaactgaggacataaagatgtctttagaagaaaagagtagagatgtctgtgccaaatgggagtctcttcatcatgaactgtctttatatgttcaacaactaaaaatagatattgaaaaaggaaagcttagtgacaatattttaaaacttgaaaagcaaataaataaagaaaagaaacttatccgtagaggaaggaccaagggtctcatcaaagaacatgaggcctgcttttctgaggaaggctgcctgtaccagcttaatcaccacatggaagtcctgagggagctgtgtgaagagctgccttcacagaagagtcaacaagaagtgaagagactactcaaagattatgaacaaaagatagaaagacttctgaaatgtgcttccgagattcatatgacactgcagcccacagcgggaggcacgtcgaaaaacgaggggaccatcaccacatctgagaatagaggaggggatccccacagtgaggcaccatttgcaaaatcagataatcagccatcaactgaaaaggcaatggaacccactatgaagtttagcctggcatcagtgttaaggcctctgcaagaagaaagcattatggaaaaggattacagtgcatctataaatagtttactagagaggtatgatacatacagagatattcttgaacaccacctgcaaaacaacaaattcaggattacttctgatttctctagtgaagaggacaggagtagttcttgtctgcaggctaaactgacagatctacaggtcataaaaaatgaaactgatgctcgctggaaagagtttgaaattatttcattgaagttagaaaatcatgtgaatgacataaaaaagccttttgtaattaaggaaagagacacactaaaggaaagagaaagagagcttcagatgactcttaataccagaatggaatctttagagacagcactgcggcttgtgttacctgtagagaaggcatcacttcttctctgtggctcggacctgcctctccataaaatggccatccagggatttcatctcattgatgctgatcgcatctatcaacacctaaggaatatccaagattccatagcaaaacagattgaaatatgtaaccgcttagaagagccaggcaactttgtattaaaggagttacacccatttgatctacacgcaatgcagaatattatactgaaatacaaaacacaatttgaaggaatgaaccacagggtgcagaggagtgaagatactctcaaagctctggaagactttttggcgtctctcagaacagctaaactctctgctgagcccgttacagacctttcagcctcagatacacaggtggcacaagaaaatacgttgacagtaaaaaataaagagggagaaattcatctgatgaaagacaaggccaaacatttggataaatgtttgaagatgctcgatatgagctttaaagatgctgaacggggtgatgacacctcctgtgaaaacctgcttgatgctttttcaataaagttatctgagacacatggctatggggtacaggaggaattcactgaggaaaacaaattactagaggcttgtattttcaaaaataatgaactccttaaaaatattcaagatgtgcagagtcaaatcagtaaaattggtcttaaggatcctactgttccagctgtgaaacatcggaaaaaatcattaatcagactggataaggttctagatgaatatgaagaagagaagagacatttacaagaaatggctaattctcttccacacttcaaagatggcagagaaaaaaccgtgaatcaacagtgccaaaatacagtagtcttgtgggagaataccaaagccttggtcaccgaatgtcttgaacaatgtgggagagttttggagctcttaaaacaatatcagaattttaaaagcatcttgacaactttgattcaaaaagaagagagtgtcatctccctgcaggcttcgtacatgggaaaggagaacctgaagaaaaggatagcagagattgaaattgtcaaagaagaatttaatgagcatttagaagttgtagacaagataaaccaggtctgcaaaaatctacaattttatctaaataaaatgaaaacttttgaagagcccccttttgaaaaagaggctaatattattgtggatagatggcttgatataaatgagaagacagaagattactatgaaaatcttggtcgagctctagctttgtgggacaaactttttaacttaaaaaatgtcattgatgagtggacagaaaaggcccttcaaaaaatggaattacatcaattgactgaagaggacagagaaaggctgaaggaagaattacaagtccatgaacaaaaaacttcagaattttctagaagagtggctgaaatacagtttttgctccaaagcagtgaaatacctcttgaattgcaggtcatggagtcctctattttgaacaagatggaacatgtacagaagtgcttaacaggagaatccaactgccatgcactcagtggcagcactgctgagctaagggaggatctcgaccaagccaagacccagatcgggatgactgaatccctcttaaaagccctgtctccttctgacagcttggagatcttcactaaactagaggagatacaacagcagattctacagcaaaaacacagtatgatattacttgagaatcaaataggttgtctgactcctgaactctctgaattgaaaaagcaatatgaaagtgtcagtgatttatttaataccaaaaaaagtgttttgcaagatcacttttctaagttattgaatgatcaatgcaagaactttaatgactggttcagcaacattaaagtgaaccttaaggagtgttttgaatcatcagaaacaaaaaagagtgtggaacaaaagctacaaaaactttctgatttcttgactcttgaaggaagaaacagtaaaataaagcaggtggacagcgtactgaagcatgtgaagaagcatctgcccaaagcacatgtgaaggagcttatcagttggctcgtgggtcaggaattcgaattagaaaaaatggagtccatatgccaggctcgagcaaaggagcttgaagactccttgcagcagctactgagactccaggatgaccatagaaacctgaggaagtggttgactaatcaagaagagaaatggaaaggaatggaagaaccaggggagaaaactgagctgttctgccaagctttagctagaaagagggaacagtttgaatctgtggcccaattgaacaactctttgaaggaatatgggtttactgaagaagaagaaataataatggaagcaacatgtttgatggatagataccagacattactgagacaactaagtgaaatcgaggaagaggataagttactacccacagaggaccagagctttaatgatcttgcacatgatgtaattcattggataaaagagattaaagagtcccttatggttttgaattcatccgaaggcaaaatgccacttgaggaaagaatccaaaaaatcaaggaaatcattttgctgaagcctgaaggggatgccagaatagagaccatcatgaagcaggctgagagcagcgaggccccgctggttcagaagaccctcactgacatcagcaaccagtgggacaacacactccatttagctagcacctacctaagccatcaagaaaagcttctactagaaggagagaaatatttacaaagtaaggaggatctgagattaatgctcatagaactaaagaagaaacaggaagcaggctttgctctacaacatggtctgcaggagaagaaagctcagttaaagatttataagaaattcctcaagaaagcccaagatttgacatccttgctaaaggagttaaaatctcagggaaactacctcttggagtgcactaaaaatcccagcttcagtgaagagccttggctggaaataaagcatctacacgaaagtcttcttcaacaactgcaggattctgtgcaaaacttggacggtcacgttcgagaacatgattcataccaggtttgcgtcacagacctgaatactacattggacaatttctccaaggaatttgtcagtttttctgataagcctgtggatcaaatagcggttgaggaaaaattgcagaaactgcaggaactagagaatagactcagtttacaagatggcacattaaagaagattttagctttagcaaaatccgtcaagcaaaatacatcttcagtggggcagaagattattaaagatgatataaaatcacttcagtgtaaacaaaaagatttggaaaacaggcttgcatctgctaagcaggagatggaatgttgtctcaacagcattctcaaatcaaaacgctcaacagaaaagaaaggaaagtttactctgccaggcagagagaagcaggccacttctgatgtgcaggagtctactcaggaatcagctgcagtggaaaagttggaggaagactgggaaataaacaaggattcagctgtggaaatggctatgtcaaaacaactttctcttaatgctcaagaaagcatgaaaaacactgaagatgagcggaaagtcaatgagctgcaaaatcaacctttagaattagatactatgttaagaaatgaacaattagaagagatagagaaattatatacccagttggaagcaaagaaagcagccattaagccactggaacaaacagaatgtcttaacaaaacagaaactggggccttggttctccacaatataggatattcggcacagcatttggacaatttgcttcaggcacttattactttgaagaaaaacaaagaaagccaatattgtgtcctcagagattttcaggaataccttgctgcagttgaatcttcaatgaaagccttgttgacagacaaggaaagtcttaaagtaggaccactggacagtgtaacgtatctggacaaaattaaaaaattcatagcatccatagaaaaagagaaagattctttaggcaacttgaaaatcaaatgggagaatttatcaaaccacgtgactgacatggataagaaattgttggaaagccagattaagcaacttgaacatggttgggaacaagtggaacagcagattcaaaagaagtattctcagcaggtagtggaatatgatgaatttacaaccctcatgaataaggtacaggacactgagatttctctgcaacagcagcagcaacatctacagttaaggctgaagtctccagaagaacgggcagggaaccaaagcatgattgccttgaccactgacctccaggctaccaagcatggattttctgttttaaaggggcaagctgaacttcagatgaagaggatttggggagaaaaagaaaagaagaatttggaggatggaataaataacttgaagaaacaatgggaaacattggagccattacacttagaagcagaaaatcagattaagaagtgtgacataaggaacaagatgaaagagactatcttatgggccaagaatttgttgggtgaacttaatccctccattccccttctcccagatgacattctttcacagatcagaaagtgcaaagtgacacatgatggcattctagctaggcagcagtctgtggaatcgttggctgaagaggtcaaagataaggttcctagccttacaacctatgagggcagtgatttaaataataccctagaggacttacggaatcaataccaaatgctggttttaaaatcaactcaaagatcacagcaattagaatttaagttggaagaaagaagcaatttttttgctataataaggaagtttcaacttatggttcaagaaagtgaaacactgataattcccagggtggagacagctgccacggaagctgaactaaaacatcaccatgttactttggaggcatctcagaaggaattgcaagaaattgacagtggaatctcaacacatcttcaggagctaacaaacatctatgaggagctgaatgtgtttgaaagattatttctggaagatcagttgaaaaatcttaagattaggaccaacagaatacaaagattcattcagaatacatgtaatgaagtggaacacaagataaagttttgcagacaattccatgaaaaaacatcagcgcttcaggaggaggctgacagtatacagcgcaatgaactattacttaatcaagaagtaaataaaggtgttaaagaggagatctataatcttaaagacagactcaccgctattaagtgttgcatcttacaggtattgaaacttaaaaaagtgtttgactatattggactaaactgggatttttcacaacttgaccaattacaaacccaagtatttgaaaaagaaaaggaacttgaagaaaaaattaagcagttggacacatttgaggaagaacatggcaaatatcaggcattattaagtaaaatgagagctattgatttgcaaattaagaaaatgactgaagtagtactaaaagctcctgatagctctccggaaagcagacggctcaatgcccaaattttaagtcagagaattgagaaagccaagtgtttatgtgatgagataataaagaaattaaatgaaaataagacctttgatgactcattcaaggagaaagaaatactacaaataaagctgaatgcagaagaaaatgataagttatacaaagttctccaaaacatggtattagaactctcaccaaaagaattggatgaaaagaattgtcaggacaaactagaaacttccttacatgttttaaatcagataaaatctcaattacagcagccattacttataaatttggaaattaaacatattcaaaatgaaaaggacaattgtgaagcatttcaggagcaagtttgggcagaaatgtgtagtattaaagctgtgactgctattgagaaacaaagagaagaaaactcttctgaagcgagtgatgtggagacaaaactacgtgagtttgaagatcttcagatgcagcttaacacaagcattgatttgcgcacaaatgtcttgaatgatgcttatgaaaatctaacacgctataaagaagcagtcaccagggcagtggagagcatcacttccctcgaagccatcattataccctacagagtagatgttggtaatccagaagaatctttagagatgcctcttcgaaaacaagaggaattggaatccacagtagcacacatccaggacctcactgagaaactgggaatgatatccagccccgaagccaaactacaacttcagtatactttacaggaactagtttctaagaactcagcaatgaaggaagctttcaaagcacaggaaactgaggcagaaaggtatcttgagaattacaaatgctatagaaaaatggaagaggatatttacactaacctcagcaaaatggagacagttcttggacagtccatgtcctcgttgccactgtcttacagagaagctttagagcgcttggaacagagcaaggccttggtgtcaaatcttatatcaaccaaagaagagttaatgaaactacgacagatccttagactcttgagactcaggtgcacagaaaatgatggcatatgtttgctcaagattgtgtcggctctgtgggagaaatggctgagtttgctggaagctgctaaagagtgggagatgtggtgcgaagaactgaagcaggaatggaaatttgtcagtgaagaaattgaacgagaggcaattattttagataatcttcaggaagaactccctgaaatttccaaaacaaaagaggcagccaccacagaggaactctctgagctgctagactgtttatgccaatatggagagaacgtggagaagcaacagctgttactgactctacttcttcagcgcatcagaagtatccagaatgttcctgaaagctcaggggctgtggaaactgttccagcatttcaagaaattacttctatgaaagaacgatgcaacaagcttcttcagaaagttcagaaaaataaagaattggtgcagactgaaatccaagaaagacattccttcacaaaagagataattgctttgaagaatttctttcaacagaccacaacttcattccaaaatatggcattccaggatcacccagaaaagtcagaacaatttgaggagcttcaaagcatccttaagaaagggaaactaacttttgagaatattatggaaaaactgcgaatcaagtattccgaaatgtacaccatagtccctgcagagattgaatcccaggtggaagaatgcagaaaagctttagaagacatagatgagaagattagcaatgaagtcttaaaaagctcaccatcatatgcaatgaggagaaaaatagaagaaattaacaatgggcttcataatgttgaaaagatgttgcagcagaaaagcaaaaatattgagaaagctcaagaaattcaaaagaaaatgtgggacgagttagatctatggcattccaaactaaatgagctggattctgaagttcaggacattgttgaacaggacccaggacaggctcaagaatggatggataacttgatgattcctttccagcagtatcagcaagtatcacagagagcagagtgtagaacctcacagttgaataaggccacagttaagatggaggaatatagtgaccttctgaagagcactgaggcttggatagaaaataccagtcatttgctggccaatcctgctgactatgactctttgaggacactgagtcaccatgctagcactgtgcagatggctttggaagattcagaacagaagcacaatcttttacattcaatctttatggatctagaagacctgtcaataatttttgaaacagatgaattaacccaatccatacaagagttaagtaatcaagtaacagctttacaacaaaaaataatggaaagccttccacagattcagcgaatggctgatgatgtggttgctattgaatctgaagtaaaatcaatggaaaaaagagtttcaaaaatcaaaactatcctattatcaaaagaaatatttgatttttcacctgaagaacatctcaaacatggggaggtcatacttgaaaatatacgtcccatgaagaaaaccattgctgagatagtgtcttaccaagtggaactgaggttgccccaaacaggaatgaaacctctgcctgtgtttcagcggacaaatcagcttttacaagatataaaactattggaaaatgtgactcaagaacaaaatgagttattaaaggtagtcataaaacagaccaatgaatgggatgaagaaatagaaaatttgaaacagatcttaaataattattcagctcagttctcccttgaacatatgtcaccagaccaagctgacaagctgccacaactacagggagaaatcgaacgtatggagaaacagattctgagtttgaaccagagaaaagaagacctgttggtggacttgaaggccaccgtactaaaccttcaccagcatttgaagcaagaacaagaaggagtagaaagagataggctgccagctgtaacatcagaggaaggtggagtggcagagagggatgcttctgagcggaagttgaacagaagaggctccatgtcttacctggcagcagtcgaggaagaggtggaagaaagttccgtgaagagcgataatggagatgagaaggcagagccatcgcctcagtcttggtcttcactttggaagcatgacaaggacatggaagaagacagagcttcctcatcctctggaacaattgttcaggaagcatatgggaaaataagcacctctgataattccatggcacaaatcctcacaccagactcactaaacactgagcaaggcccagaatgttccctaaggcccaaccaaacagaagagggcaccacacctcctattgaggctgacactctggactcttctgacgcgcaaggaggtttggagcccagggtggagaaaactaggccggagcccacagaagtcctgcatgcctgcaagacccaggtggccgagctggagctgtggctgcaacaagccaacgtggcagttgagccggaaacattaaacgcagacatgcagcaggtgctggaacagcagctggtagggtgccaggctatgctaacagagattgagcacaaggttgcctttctgttagagacttgcaaagatcagggcctgggagataatggagccactcaacatgaggctgaagcgctttccctgaaactgaaaacagtgaagtgcaatttagaaaaagtccagatgatgcttcaggagaagcacagtgaagatcagcatcctaccattctaaagaaatcctcagagccagagcatcaagaagctctccaaccagttaacctttctgaattggaatccattgtaactgaaaggccacaattcagcagacaaaaagatttccagcagcaacaggttctggagttaaaaccaatggaacagaaagatttcatcaaattcatagaatttaatgctaagaaaatgtggccccagtattgccaacatgataacgatacaactcaggaatcatctgcaagcaaccaggcatccagccctgaaaatgacgttccagactcgatcttgtcaccccagggccaaaatggagataagtggcaatatctgcatcatgaactctcatcaaaaataaagctcccactccctcagcttgtggagcctcaggtttccacaaatatgggtattctacccagcgtgactatgtataactttagatacccaacaactgaagaactgaaaacctataccacccaacttgaagacctgcgccaagaagcaagtaaccttcagacacaggaaaatatgacagaagaagcatatatcaatttggataaaaaattgtttgaactattcctgaccctcagtcagtgcctcagcagtgtggaggagatgctggagatgcccagactttacagggaggatggttctggccagcaggtgcactacgagacgctggctcttgagttgaagaaactttatttagcgctaagtgacaagaagggtgatcttttgaaagccatgacttggcctggcgagaacaccaacttgctccttgaatgttttgacaaccttcaagtctgcctggagcacactcaggctgcagctgtctgtagaagcaagtccctgaaagctggcctcgattacaaccgcagttaccagaatgaaataaagagattatatcatcagctcattaagagtaagacatctttacaacagtctttgaatgaaatcagtgggcagagtgttgctgaacagcttcagaaagcagatgcatatacagtggagctggagaacgccgagagccgagtggccaaactaagagatgaaggggagaggcttcatttaccttatgctttactccaggaggtttacaaattagaggatgtacttgacagtatgtggggaatgctaagagccaggtacacagaactcagcagccctttcgtcactgagagccagcaagatgctttgttgcaaggcatggtggaactggtgaagattgggaaggaaaagcttgctcatggccacttaaaacaaaccaaaagtaaagtggcgttacaggctcaaatagaaaatcacaaggtttttttccagaagcttgttgctgacatgttgttgatccaagcatactctgccaaaatacttccttctttattgcaaaacagagagacattttgggcagaacaagtaacagaagttaaaatactagaagaaaagtcacgccaatgtggtatgaagctgcagagtttgttgcagaaatgggaagaatttgatgaaaactatgcatctcttgaaaaggacctggaaattcttatatctacattgccctctgtgagtttggtggaagaaacagaggaaagattagtggaaaggatttcattttaccagcaaataaaaagaaacattggtggaaaacacgcccggctttaccaaactctgaacgaaggcaaacagttggtggcgtctgtgagctgtcctgaattagagggccagatcgcaaaactggaagagcagtggttgtccctgaacaagaaaattgaccatgagctccacaggctgcaagctcttctcaagcatctgctcagttataacagagattcggatcagttaaccaagtggttggaatcttcccagcatactctgaattactggaaagaacagtccctcaatgtgtctcaggacttggatacaatcagaagcaacatcaacaatttttttgagttttcaaaagaagttgatgaaaaatcctccttgaagactgccgttatcagtatcgggaaccagcttcttcacctgaaagaaactgatacagctacactgagagcttctttagcacagtttgaacaaaaatggacaatgctcataactcaacttccagatattcaagaaaaacttcaccagcttcaaatggagaaattgccgtctcgtaaagcaatcacagaaatgattagctggatgaacaatgtggagcatcaaacttcagatgaagactccgtgcattcaccaagttctgcatctcaagttaaacatcttcttcagaagcacaaggagtttagaatggaaatggactataaacagtggatagttgacttcgttaaccagtcattacttcagctaagcacctgtgatgtagaaagcaagcgctatgaaagaacggagtttgcagagcacctgggggagatgaaccgccagtggcaccgtgtacatggaatgctgaatagaaagatacaacatttagaacaacttctagaaagtatcactgagagtgaaaataaaatacagatcttgaacaactggctggaagcacaagaagagagactgaaaactttacaaaaacctgaaagtgtgatctcagtgcagaagctgctcctggactgtcaggatatagaaaatcaacttgcaattaaatccaaagcactagatgagttgaaacaaagttatctgactttggagagtggggcagtgccattgttagaagatacagcatcccgaattgatgagttatttcaaaagagaagcagtgttctcactcaggtcaatcagctcaaaacctccatgcagtcagttttacaggagtggaagatttatgatcaactctatgatgaagtgaatatgatgacaatccgattctggtactgcatggaacacagcaagcctgtggtgttatcattggagaccttgagatgccaggtggagaaccttcagtctctgcaagatgaagctgagagcagtgaagggagttgggagaaactccaggaggttatcggcaaactcaaaggtctctgcccctctgttgctgaaataatcgaagagaaatgccaaaatactcataaaaggtggactcaggtgaaccaagccattgcagaccagttgcagaaggcccagagtctgctccagctctggaaggcctatagcaatgctcatggtgaagctgccgcaaggctgaagcagcaggaagcaaagtttcaacagctcgcaaacatcagcatgtctggaaacaacctggcagagatcctgcccccagccctgcaggacataaaggagctgcagcatgatgtgcagaaaacaaaagaagcctttctccaaaattccagtgtcctggatcgactcccacaacccgcagagtccagcacccacatgctcctcccgggccccctgcactctctccagagggctgcttatttggaaaagatgctgcttgtgaaagcaaatgaatttgagtttgttctctcacagtttaaggattttggagtccggctggaatctttaaaaggtcttattatgcatgaagaagagaatttggatagacttcaccaacaggaaaaagaaaatcctgactcattcctgaatcatgtgctggcactgacagcccaatcacctgatattgaacatttgaatgaagtgagcctcaagctcccacttagtgacgtagctgtgaagacgttacaaaatatgaaccggcaatggattcgggccacggccacggcactggagcgctgcagtgagcttcagggaattggattgaatgaaaagtttctttattgctgtgaaaagtggatccaacttttggagaagatagaagaagcactcaaagtggatgtggctaacagccttcctgagctcctggagcagcagaaaacctataagatgttagaagctgaagtttctataaaccagacaattgctgattcctatgtcacccagtccttacaactcctggacacaacagaaatagagaacagaccagaatttattacagaattctcaaagctgacggatcggtggcagaatgctgtccagggtgttcggcagaggaagggtgacgttgatgggctggtgaggcagtggcaagatttcactacttctgtggagaacttgtttcgcttcctcactgacaccagccacctgctatctgcagtgaagggccaggagcgcttcagcctctaccaaaccagaagtctgatccatgagctgaagaataaagaaattcattttcaaaggaggcgaactacctgtgccctaaccttggaagctggagaaaagttactgctcacaactgacctgaaaactaaagagtctgtgggtaggagaatcagtcaacttcaggacagctggaaagacatggagccccagctggcagagatgattaagcagttccagagcactgtagagacctgggaccagtgtgaaaagaaaatcaaggagttgaaaagcaggctgcaagttttaaaggcacaaagtgaagatcctcttccagagcttcacgaggacctccataacgaaaaagagctgattaaggaactagaacagtctttggctagctggactcagaacttgaaagaacttcaaactatgaaggcggacttaacccggcacgttctcgtggaagatgtgatggttttgaaggagcaaatagagcatttgcacagacaatgggaggacctctgcttaagggtggccatacgtaaacaggagattgaagacagactcaatacatgggttgtattcaatgaaaaaaataaagagttgtgtgcctggctggtgcagatggaaaacaaagttctacagacagcggacattagtattgaagaaatgattgaaaagttacagaaggactgcatggaagaaataaacttgtttagtgaaaacaagttacagttaaagcagatgggtgaccagttgatcaaggccagcaacaaatcaagagcagctgagatcgatgacaagctcaacaaaattaacgatcgttggcaacatctttttgatgtcatcggatcaagggtgaagaagctgaaggagacctttgcttttattcagcagttggacaaaaacatgagcaaccttcgcacctggttggctcgaattgagtctgagctttccaagcctgttgtttatgatgtctgcgatgatcaagagatccagaagaggctcgctgagcagcaggatctacagcgagatattgaacaacacagcgcaggggtggagtccgtgtttaacatctgtgacgtcctactgcacgactccgatgcctgtgcaaatgagaccgagtgtgactcgatccagcagaccaccaggagcctggacagacgctggaggaacatttgtgccatgtccatggagcggcgcatgaaaatcgaggagacgtggcgcctgtggcagaagtttttagacgactattctcgctttgaggactggctcaagtcagctgagaggacggcagcctgcccaaattcctcagaggtgttgtacacgagtgccaaagaggaactgaagaggtttgaggcctttcagcggcagattcatgagcggctcactcagctggagctcatcaacaagcagtaccggcggctggcccgggagaaccgcacagacacggccagcaggctgaagcagatggtccacgagggcaaccagcgctgggacaaccttcagaggcgggtcacagccgtcctgcggagactcaggcatttcaccaaccagagggaagaatttgagggcaccagggagagcattctggtgtggctcacagagatggacctgcagctgaccaacgtggagcacttctcagagagtgacgccgatgacaagatgcgccaactgaatggcttccaacaggaaattacattaaataccaacaagattgatcagctcattgtgtttggggagcagctgattcagaagagcgagcccctggatgctgtgctgattgaggatgagctggaggaactccaccgctactgccaggaggtgtttggaagggtctcccggttccaccggcggctcacctcctgcactccgggcttggaagatgaaaaggaggcctctgagaatgaaacagacatggaagaccccagagaaatccagactgattcttggcgtaaacggggagagagcgaggaaccgtcatctcctcagtccctgtgtcatctagtggccccagggcacgagcggtctggctgcgagacccctgtcagcgtggactccatccccctggagtgggaccacacaggcgacgtggggggctcctcctctcacgaagaggacgaggagggcccatactacagcgcactgtcaggtaaatccatttcggatggccactcgtggcatgttcccgacagcccttcctgtcccgagcatcactacaagcaaatggaaggtgacaggaatgttccacctgttccccctgcgtccagcaccccttataaaccaccctatggaaagctactattacctccaggcacggatggtggcaaagaaggcccgcgagtcctgaatggcaacccacagcaggaagacgggggactggccggtatcacagagcagcagtcaggtgccttcgacagatgggagatgattcaagcacaggagcttcacaataagctcaaaataaaacaaaatttgcaacagctgaactctgatatcagcgccatcactacttggctgaaaaaaactgaagcagagctggaaatgttaaagatggcaaagcctccctctgatatccaggaaatagaactgagagtgaagagactgcaggagatactgaaagcctttgacacttacaaggcattagtggtctctgtcaacgtgagcagcaaggaatttctgcaaaccgagagccccgaatccacagagctccaaagtagactccgccagctgagcctgctctgggaagcagcacagggcgcagtggacagctggagagggggcttacgacagtcgctcatgcagtgccaggacttccaccagttgagtcaaaatctgctgctgtggttagcgagtgccaagaaccggaggcagaaggctcatgtcaccgatccaaaggcagacccccgggctctcctagagtgtcggagggaactaatgcaactggaaaaggagctggtagaacgtcaacctcaagtggacatgttacaggagatttcaaacagccttctcattaagggacatggagaagactgtattgaagctgaagaaaaggtgcatgttattgagaagaaactcaaacagttacgggagcaagtgtcccaagatttaatggccttgcagggaacccagaacccagcctcacccctgcccagcttcgacgaggtagactcgggggaccagcctcctgcaacatccgtgccagctccccgagcaaagcagttcagagcagtgagaactacagaaggcgaggaggagacagagagcagggtccccggcagcacacggccacagcgctccttcctctcaagggtggtccgggcagccctacccctgcagctgctcctcctgctgctgctgctcctggcctgcctgctgccctcctccgaagaagactacagctgcactcaggccaacaactttgcccggtccttttaccccatgctgaggtacaccaatgggccaccccccacatag

SEQ ID NO: 166 - DNA, 2370 bp, Homo sapiens
atgacatcctttcaagaagtcccattgcagacttccaactttgcccatgtcatctttcaaaatgtggccaagagttaccttcctaatgcacacctggaatgtcattacaccttaactccatatattcatccacatccaaaagattgggttggtatattcaaggttggatggagtactgctcgtgattattacacgtttttatggtcccctatgcctgaacattatgtggaaggatcaacagtcaattgtgtactagcattccaaggatattaccttccaaatgatgatggagaattttatcagttctgttacgttacccataagggtgaaattcgtggagcaagtacacctttccagtttcgagcttcttctccagttgaagagctgcttactatggaagatgaaggaaattctgacatgttagtggtgaccacaaaagcaggccttcttgagttgaaaattgagaaaaccatgaaagaaaaagaagaactgttaaagttaattgccgttctggaaaaagaaacagcacaacttcgagaacaagttgggagaatggaaagagaacttaaccatgagaaagaaagatgtgaccaactgcaagcagaacaaaagggtcttactgaagtaacacaaagcttaaaaatggaaaatgaagagtttaagaagaggttcagtgatgctacatccaaagcccatcagcttgaggaagatattgtgtcagtaacacataaagcaattgaaaaagaaaccgaattagacagtttaaaggacaaactcaagaaggcacaacatgaaagagaacaacttgaatgtcagttgaagacagagaaggatgaaaaggaactttataaggtacatttgaagaatacagaaatagaaaataccaagcttatgtcagaggtccagactttaaaaaatttagatgggaacaaagaaagcgtgattactcatttcaaagaagagattggcaggctgcagttatgtttggctgaaaaggaaaatctgcaaagaactttcctgcttacaacctcaagtaaagaagatacttgttttttaaaggagcaacttcgtaaagcagaggaacaggttcaggcaactcggcaagaagttgtctttctggctaaagaactcagtgatgctgtcaacgtacgagacagaacgatggcagacctgcatactgcacgcttggaaaacgagaaagtgaaaaagcagttagctgatgcagtggcagaacttaaactaaatgctatgaaaaaagatcaggacaagactgatacactggaacacgaactaagaagagaagttgaagatctgaaactccgtcttcagatggctgcagaccattataaagaaaaatttaaggaatgccaaaggctccaaaaacaaataaacaaactttcagatcaatcagctaataataataatgtcttcacaaagaaaacggggaatcagcagaaagtgaatgatgcttcagtaaacacagacccagccacttctgcctctactgtagatgtaaagccatcaccttctgcagcagaggcagattttgacatagtaacaaaggggcaagtctgtgaaatgaccaaagaaattgctgacaaaacagaaaagtataataaatgtaaacaactcttgcaggatgagaaagcaaaatgcaataaatatgctgatgaacttgcaaaaatggagctgaaatggaaagaacaagtgaaaattgctgaaaatgtaaaacttgaactagctgaagtacaggacaattataaagaacttaaaaggagtctagaaaatccagcagaaaggaaaatggaaggtcagaattcccagagtcctcaatgtttcaaaacatgctcagagcaaaatggttatgttctcacattgtcaaatgcacaaccagttctgcaatatggtaatccttatgcatctcaggaaacaagagatggagcagatggtgctttttacccagatgaaatacaaaggccacctgtcagagtcccctcttggggactggaagacaatgttgtctgcagccagcctgctcgaaactttagtcggcctgatggcttagaggactctgaggatagcaaagaagatgagaatgtgcctactgctcctgatcctccaagtcaacatttacgtgggcatgggacaggcttttgctttgattccagctttgatgttcacaagaagtgtcccctctgtgagttaatgtttcctcctaactatgatcagagcaaatttgaagaacatgttgaaagtcactggaaggtgtgcccgatgtgcagcgagcagttccctcctgactatgaccagcaggtgtttgaaaggcatgtgcagacccattttgatcagaatgttctaaattttgactag

SEQ ID NO: 167 - DNA, 624 bp, Homo sapiens
atggccccctttgagcccctggcttctggcatcctgttgttgctgtggctgatagcccccagcagggcctgcacctgtgtcccaccccacccacagacggccttctgcaattccgacctcgtcatcagggccaagttcgtggggacaccagaagtcaaccagaccaccttataccagcgttatgagatcaagatgaccaagatgtataaagggttccaagccttaggggatgccgctgacatccggttcgtctacacccccgccatggagagtgtctgcggatacttccacaggtcccacaaccgcagcgaggagtttctcattgctggaaaactgcaggatggactcttgcacatcactacctgcagttttgtggctccctggaacagcctgagcttagctcagcgccggggcttcaccaagacctacactgttggctgtgaggaatgcacagtgtttccctgtttatccatcccctgcaaactgcagagtggcactcattgcttgtggacggaccagctcctccaaggctctgaaaagggcttccagtcccgtcaccttgcctgcctgcctcgggagccagggctgtgcacctggcagtccctgcggtcccagatagcctga

SEQ ID NO: 168 - DNA, 1065 bp, Homo sapiens
atggctacgcccctggtggcgggtcccgcagctctacgcttcgccgccgcggctagctggcaggttgtgcgcggacgctgcgtggaacattttccgcgagtactggagtttctgcgatctctgcgcgctgttgcccctggcttggttcgctaccggcaccacgaacgcctttgtatgggcctaaaggccaaggtggtggtggagctgatcctgcagggccggccttgggcccaagtcctgaaagccctgaatcaccactttccagaatctggacctatagtgcgggatcccaaggctacaaagcaggatctgaggaagattttggaggcacaggaaactttttaccagcaggtgaagcagctgtcagaggctcctgtggatttggcctcgaagctgcaggaacttgaacaagagtatggggaaccctttctggctgccatggaaaagctgctttttgagtacttgtgtcagctggagaaagcactgcctacaccgcaggcacagcagcttcaggatgtgctgagttggatgcagcctggagtctctatcacctcttctcttgcctggagacaatatggtgtggacatggggtggctgcttccagagtgctctgttactgactcagtgaacctggctgagcccatggaacagaatcctcctcagcaacaaagactagcactccacaatcccctgccaaaagccaagcctggcacacatcttcctcagggaccatcttcaaggacgcacccagaacctctagctggccgacacttcaatctggcccctctaggccgacgaagagttcagtcccaatgggcctccactaggggaggccataaggagcgccccacagtcatgctgtttccctttaggaatctcggctcaccaacccaggtcatatctaagcctgagagcaaggaagaacatgcgatatacacagcagacctagccatgggcacaagagcagcctccactgggaagtctaagagtccatgccagaccctggggggaagggctctgaaggagaacccagttgacttgcctgccacagagcaaaaggagtga

SEQ ID NO: 169 - DNA, 2577 bp, Homo sapiens
atgggagaccacctggaccttctcctaggagtggtgctcatggccggtcctgtgtttggaattccttcctgctcctttgatggccgaatagccttttatcgtttctgcaacctcacccaggtcccccaggtcctcaacaccactgagaggctcctgctgagcttcaactatatcaggacagtcactgcttcatccttcccctttctggaacagctgcagctgctggagctcgggagccagtatacccccttgactattgacaaggaggccttcagaaacctgcccaaccttagaatcttggacctgggaagtagtaagatatacttcttgcatccagatgcttttcagggactgttccatctgtttgaacttagactgtatttctgtggtctctctgatgctgtattgaaagatggttatttcagaaatttaaaggctttaactcgcttggatctatccaaaaatcagattcgtagcctttaccttcatccttcatttgggaagttgaattccttaaagtccatagatttttcctccaaccaaatattccttgtatgtgaacatgagctcgagcccctacaagggaaaacgctctccttttttagcctcgcagctaatagcttgtatagcagagtctcagtggactggggaaaatgtatgaacccattcagaaacatggtgctggagatactagatgtttctggaaatggctggacagtggacatcacaggaaactttagcaatgccatcagcaaaagccaggccttctctttgattcttgcccaccacatcatgggtgccgggtttggcttccataacatcaaagatcctgaccagaacacatttgctggcctggccagaagttcagtgagacacctggatctttcacatgggtttgtcttctccctgaactcacgagtctttgagacactcaaggatttgaaggttctgaaccttgcctacaacaagataaataagattgcagatgaagcattttacggacttgacaacctccaagttctcaatttgtcatataaccttctgggggaactttacagttcgaatttctatggactacctaaggtagcctacattgatttgcaaaagaatcacattgcaataattcaagaccaaacattcaaattcctggaaaaattacagaccttggatctccgagacaatgctcttacaaccattcattttattccaagcatacccgatatcttcttgagtggcaataaactagtgactttgccaaagatcaaccttacagcgaacctcatccacttatcagaaaacaggctagaaaatctagatattctctactttctcctacgggtacctcatctccagattctcattttaaatcaaaatcgcttctcctcctgtagtggagatcaaaccccttcagagaatcccagcttagaacagcttttccttggagaaaatatgttgcaacttgcctgggaaactgagctctgttgggatgtttttgagggactttctcatcttcaagttctgtatttgaatcataactatcttaattcccttccaccaggagtatttagccatctgactgcattaaggggactaagcctcaactccaacaggctgacagttctttctcacaatgatttacctgctaatttagagatcctggacatatccaggaaccagctcctagctcctaatcctgatgtatttgtatcacttagtgtcttggatataactcataacaagttcatttgtgaatgtgaacttagcacttttatcaattggcttaatcacaccaatgtcactatagctgggcctcctgcagacatatattgtgtgtaccctgactcgttctctggggtttccctcttctctctttccacggaaggttgtgatgaagaggaagtcttaaagtccctaaagttctcccttttcattgtatgcactgtcactctgactctgttcctcatgaccatcctcacagtcacaaagttccggggcttctgttttatctgttataagacagcccagagactggtgttcaaggaccatccccagggcacagaacctgatatgtacaaatatgatgcctatttgtgcttcagcagcaaagacttcacatgggtgcagaatgctttgctcaaacacctggacactcaatacagtgaccaaaacagattcaacctgtgctttgaagaaagagactttgtcccaggagaaaaccgcattgccaatatccaggatgccatctggaacagtagaaagatcgtttgtcttgtgagcagacacttccttagagatggctggtgccttgaagccttcagttatgcccagggcaggtgcttatctgaccttaacagtgctctcatcatggtggtggttgggtccttgtcccagtaccagttgatgaaacatcaatccatcagaggctttgtacagaaacagcagtatttgaggtggcctgaggatctccaggatgttggctggtttcttcataaactctctcaacagatactaaagaaagaaaaagaaaagaagaaagacaataacattccgttgcaaactgtagcaaccatctcctaa

SEQ ID NO: 170 - DNA, 753 bp, Homo sapiens
atggggtctcagcattccgctgctgctcgcccctcctcctgcaggcgaaagcaagaagatgacagggacggtttgctggctgaacgagagcaggaagaagccattgctcagttcccatatgtggaattcaccgggagagatagcatcacctgtctcacgtgccaggggacaggctacattccaacagagcaagtaaatgagttggtggctttgatcccacacagtgatcagagattgcgccctcagcgaactaagcaatatgtcctcctgtccatcctgctttgtctcctggcatctggtttggtggttttcttcctgtttccgcattcagtccttgtggatgatgacggcatcaaagtggtgaaagtcacatttaataagcaagactcccttgtaattctcaccatcatggccaccctgaaaatcaggaactccaacttctacacggtggcagtgaccagcctgtccagccagattcagtacatgaacacagtggtcagtacatatgtgactactaacgtctcccttattccacctcggagtgagcaactggtgaattttaccgggaaggccgagatgggaggaccgttttcctatgtgtacttcttctgcacggtacctgagatcctggtgcacaacatagtgatcttcatgcgaacttcagtgaagatttcatacattggcctcatgacccagagctccttggagacacatcactatgtggattgtggaggaaattccacagctatttaa

SEQ ID NO: 171 - DNA, 651 bp, Homo sapiens
atgctcccgaacgtcggttctccacctcttcccttccgaaagtgcccgagcggtgccggacggactaatcgggcctcggccgtggctcggacgtccgctcccgaaacgcggcgcggtcgggccccttcgtcaggagacgcgaaaatggccgaaggagcgcgagcgcgcgggccgagaggctgccgggatcgcgacggaccggcgggcggggcgggtaagatggcggccccgcggcgagggagaggatcctccacagtgctctcttcagttccccttcaaatgctgttttatctcagcggaacgtactacgccctgtatttcctcgccacgctcctgatgatcacgtataaaagtcaggtgttcagctatcctcaccgctacctggtcctcgatcttgctctgctgtttctgatggggattctagaagcagttcggttatacctgggcaccaggggcaacctgacagaggctgagaggccgctggccgccagcctggccctcacggctggcaccgccctcctctctgcccacttcctgctttggcaggccctagtgttgtgggcggactgggccctcagcgccacgctcctggcccttcacggcctggaggccgtcctgcaggtggttgccatcgcggccttcaccaggtag

SEQ ID NO: 172 - DNA, 1038 bp, Homo sapiens
atgcagcttgaaatccaagtagcactaaattttattatttcgtatttgtacaataagcttcccaggagacgtgtcaacatttttggtgaagaacttgaaagacttcttaagaagaaatatgaagggcactggtatcctgaaaagccatacaaaggatcggggtttagatgtatacacataggggagaaagtggacccagtgattgaacaagcatccaaagagagtggtttggacattgatgatgttcgtggcaatctgccacaggatcttagtgtttggatcgacccatttgaggtttcttaccaaattggtgaaaagggaccagtgaaggtgctttacgtggatgataataatgaaaatggatgtgagttggataaggagatcaaaaacagctttaacccagaggcccaggtttttatgcccataagtgacccagcctcatcagtgtccagctctccatcgcctccttttggtcactctgctgctgtaagccctaccttcatgccccggtccactcagcctttaacctttaccactgccacttttgctgccaccaagttcggctctaccaaaatgaagaatagtggccgtagcaacaaggttgcacgtacttctcccatcaacctcggcttgaatgtgaatgacctcttgaagcagaaagccatctcttcctcaatgcactctctgtatgggcttggcttgggtagccagcagcagccacagcaacagcagcagccagcccagccgccaccgccaccaccaccaccacagcagcaacaacagcagaaaacctctgctctttctcctaatgccaaggaatttatttttcctaatatgcagggtcaaggtagtagtaccaatggaatgttcccaggtgacagcccccttaacctcagtcctctccagtacagtaatgcctttgatgtgtttgcagcctatggaggcctcaatgagaaatcttttgtagatggcttgaattttagcttaaataacatgcagtattctaaccagcaattccagcctgttatggctaactaa

SEQ ID NO: 173 - DNA, 3750 bp, Homo sapiens
atggccaccgctgcgactgaggagcccttcccttttcacggtctcctgccgaagaaggagaccggagccgcctccttcctctgccgctacccggagtatgatgggcggggggtgctcatcgcagtcctggacacgggggtcgacccgggggctccgggcatgcaggttacaactgatggaaaaccaaaaatcgttgatatcattgatacaacaggaagtggcgatgtgaatactgctacagaagtagagccaaaggatggtgagattgttggcctttcaggaagagtgcttaagattcctgcaagctggacaaatccctcaggcaaatatcatattggcataaaaaatggctatgacttctatcctaaggcactcaaggaaaggatacagaaagaacggaaggaaaaaatctgggaccctgttcacagagtggcccttgcagaagcctgtagaaaacaggaagaatttgatgttgccaacaacggctcttctcaagcaaataaactaatcaaggaggaacttcaaagtcaagtggaattgctaaattcttttgagaagaaatacagcgatcctggccctgtatatgactgcttggtatggcatgatggcgaagtctggagagcctgcattgattctaatgaagatggggacttgagtaaatctaccgtgttgagaaactacaaagaagcccaagaatatggctcttttggcacagctgagatgttgaattactccgttaatatatacgatgatggaaacctgctctccattgtgaccagtggaggagctcatgggacacatgtagctagtatagctgctggacactttccagaagaacctgaacggaatggggtagctcctggtgctcaaattctttccatcaagattggtgatacaagactaagcacaatggaaacaggcacaggcctcataagagctatgatagaagttataaatcataagtgtgatcttgtcaactacagttacggagaagcaactcactggccaaattctgggagaatttgtgaagtaattaatgaagcagtatggaagcataatataatttatgtttcaagtgctggaaataatggtccatgcctgtctacagttggttgtccaggtggaactacatcaagtgtgataggtgttggtgcttatgtttctcctgatatgatggttgctgagtattcactgagagagaaattacctgcaaatcaatatacttggtcttctagaggacctagtgctgacggggcccttggtgtgagtatcagtgcgccaggaggagccattgcttctgttcctaactggacactgagagggacgcagctgatgaatggaacatctatgtcttcccccaatgcatgtggaggcattgccctgatcctttcaggtctgaaagctaataacattgactacacagttcattcagtcagaagagctctagaaaacactgcagtgaaggctgacaatatagaagtatttgctcaaggacatggtattattcaggttgataaagcctatgactacctcgttcagaatacatcatttgctaataaattaggttttactgttactgttggaaataaccgtggcatctacctccgagatcctgttcaggtggctgcaccttcagatcatggcgttggcattgaacctgtatttccggagaacacagaaaactctgaaaaaatatcccttcagcttcatttagctctgacttcaaattcatcttgggttcagtgtcccagccatttggaactcatgaatcaatgtagacacataaacatacgtgtggatcccaggggcttaagagaaggattgcattatacagaggtatgtggctatgatatagcatcccctaacgcaggtccgctcttcagagttccgatcactgcagttatagcagcaaaagtaaatgaatcatcacattatgatctagcctttacagatgtacactttaaacctggtcaaattcgaaggcattttattgaggttcctgagggtgcaacatgggctgaagtgacagtgtgttcgtgttcttctgaggtgtcagcaaagtttgttctacatgcagtccagcttgtgaagcaaagagcatatcgaagccatgaattctataagttttgttctcttccagagaaaggaacactgactgaagcttttcctgtcctaggtggaaaagcaattgaattttgcattgctcgttggtgggcaagtctcagtgatgtcaacattgattataccatttctttccatgggatagtgtgtactgctcctcagttaaacattcatgcatcggaaggaatcaaccgctttgatgttcagtcctccttgaaatacgaagatctggctccctgcataactttgaagaactgggtccaaacactgcgcccagtgagtgcaaaaacaaaacctttaggatcaagagatgttttgccaaataaccgtcaactttatgagatggtcctgacatataactttcatcaacccaagagtggggaagtaactccaagctgcccactactttgtgaactattatatgaatctgaatttgacagccaactgtggattatttttgaccagaacaaaagacagatgggttcaggcgatgcctatccacatcagtattctttgaaactggagaaaggagattatacaattcgactacagattcgccatgagcaaatcagtgatttggaacgccttaaagaccttccatttattgtttctcatagattgtctaataccttgagcttagatattcatgaaaatcatagttttgcacttctagggaagaagaaatcaagcaatttgacattaccacccaaatataaccagccattctttgttacttccttacctgatgataaaatacctaaaggggcaggacctggatgctatcttgcaggatccttaacattgtcaaagactgaactaggaaagaaagctgatgtaatccctgttcattactacttaatacctccaccaacaaagactaagaatggcagcaaagataaggaaaaagattcagaaaaagagaaagatttaaaagaagagtttactgaagcattacgagatcttaaaattcagtggatgacaaagctggattctagtgacatttataacgaattgaaagaaacatatcctaattatcttcctctgtacgttgcacgacttcatcaattggatgctgaaaaggaacgaatgaaaagacttaatgaaattgttgatgcggcaaatgctgttatttctcatatagatcaaacagccctagcagtttatattgcaatgaagactgatcccaggcctgatgcagctactataaaaaatgacatggacaaacaaaaatccaccctcgtagatgccctttgtaggaaaggttgtgccctggcagaccatcttcttcacacccaggctcaagacggagccatttccactgatgcagaaggaaaggaggaggaaggagaaagtcctttggattctctggcagaaacattttgggaaactactaaatggactgatctctttgacaataaggttttgacatttgcatataaacatgcattagtaaataaaatgtatgggagaggccttaaatttgcaactaaacttgtggaagaaaaaccaacaaaagaaaactggaaaaattgtattcaactgatgaagttacttggatggacccattgtgcatcttttactgaaaactggctccccatcatgtatcctcccgattattgcgtattctaa

SEQ ID NO: 174 - DNA, 1725 bp, Homo sapiens
atgcctcctcagcttcaagaaactagaatgaaccgaagcattcctgtggaggttgatgaatcagaaccatacccaagtcagttgctgaaaccaatcccagaatattccccggaagaggaatcagaaccacctgctccaaatataaggaacatggcacccaacagcttgtctgcacccacaatgcttcacaattcctccggagacttttctcaagctcactcaaccctgaaacttgcaaatcaccagcggcctgtatcccggcaggtcacctgcctgcgcactcaagttctggaggacagtgaagacagtttctgcaggagacacccaggcctgggcaaagctttcccttctgggtgctctgcagtcagcgagcctgcgtctgagtctgtggttggagccctccctgcagagcatcagttttcatttatggaaaaacgtaatcaatggctggtatctcagctttcagcggcttctcctgacactggccatgactcagacaaatcagaccaaagtttacctaatgcctcagcagactccttgggcggtagccaggagatggtgcaacggccccagcctcacaggaaccgagcaggcctggatctgccaaccatagacacgggatatgattcccagccccaggatgtcctgggcatcaggcagctggaaaggcccctgcccctcacctccgtgtgttacccccaggacctccccagacctctcaggtccagggagttccctcagtttgaacctcagaggtatccagcatgtgcacagatgctgcctcccaatctttccccacatgctccatggaactatcattaccattgtcctggaagtcccgatcaccaggtgccatatggccatgactaccctcgagcagcctaccagcaagtgatccagccggctctgcctgggcagcccctgcctggagccagtgtgagaggcctgcaccctgtgcagaaggttatcctgaattatcccagcccctgggaccacgaagagaggcccgcacagagagactgctcctttccggggcttccaaggcaccaggaccagccacatcaccagccacctaatagagctggtgctcctggggagtccttggagtgccctgcagagctgagaccacaggttccccagcctccgtccccagctgctgtgcctagaccccctagcaaccctccagccagaggaactctaaaaacaagcaatttgccagaagaattgcggaaagtctttatcacttattcgatggacacagctatggaggtggtgaaattcgtgaactttttgttggtaaatggcttccaaactgcaattgacatatttgaggatagaatccgaggcattgatatcattaaatggatggagcgctaccttagggataagaccgtgatgataatcgtagcaatcagccccaaatacaaacaggacgtggaaggcgctgagtcgcagctggacgaggatgagcatggcttacatactaagtacattcatcgaatgatgcagattgagttcataaaacaaggaagcatgaatttcagattcatccctgtgctcttcccaaatgctaagaaggagcatgtgcccacctggcttcagaacactcatgtctacagctggcccaagaataaaaaaaacatcctgctgcggctgctgagagaggaagagtatgtggctcctccacgggggcctctgcccacccttcaggtggttcccttgtga

SEQ ID NO: 175 - DNA, 1563 bp, Homo sapiens
atggagtgtccacacctgagctccagcgtctgcattgctccggactcagccaagttccccaacggctccccgtcgtcctggtgctgcagcgtgtgccggtccaacaaaagcccttgggtctgtttgacttgttcaagtgtccactgtggaaggtatgtgaatggccatgcaaaaaaacattatgaagatgcacaagtacctttaaccaaccataagaaatcagaaaagcaagataaagttcagcacacagtatgtatggattgcagtagctacagtacatactgttatcgctgtgatgattttgtggttaatgacaccaagctgggactggtacagaaagtcagagaacacttacagaacttggaaaactcagctttcacagctgacaggcataagaaaagaaaacttttggaaaactcaacactaaacagcaagttattaaaagtaaatggaagcaccactgccatttgtgccacaggccttcggaatttggggaacacatgtttcatgaatgccatccttcagtcactcagtaacattgagcagttttgctgttatttcaaagaactgcccgccgtggagttaaggaatgggaaaacagcaggaaggcggacataccacaccaggagccaaggggataacaatgtgtctttggtagaagagtttagaaagacactctgtgctttatggcaaggcagccagactgcatttagcccagagtccttattttatgttgtttggaagattatgccaaactttaggggctatcaacagcaggacgcccatgaattcatgcgctaccttttggaccacctacacttggaacttcagggcggtttcaacggtgtttcccgctcagcaattctgcaggagaattctactctgtctgcaagtaacaagtgttgcataaatggagcatctactgttgtcacggctatattcggaggcattctccaaaatgaggttaactgcctcatatgtgggacagaatctagaaagtttgatccattcctagacctttcattagatattccaagtcagttcagaagtaagcgctctaagaatcaagaaaatggaccagtttgttcgttacgagattgtcttcgcagttttaccgacttagaagaacttgatgagacagagttatatatgtgccataaatgcaaaaagaaacaaaagtccacaaaaaagttttggattcaaaaactacccaaggtgctatgcttacatttgaaaagatttcattggacagcatatttaagaaataaagttgatacatacgtagaatttccactgagaggcctagacatgaaatgctacttactagagcctgagaacagtggcccggagagctgcctgtatgacctcgccgctgtggtggtgcaccatggttccggggttggttctggacattacacagcatacgcaactcacgaaggccgctggttccacttcaatgacagtactgtaacactgactgacgaggagactgtggtgaaggcgaaggcctacatccttttctacgtggaacaccaggccaaagctggatcggataaactttaa

SEQ ID NO: 176 - DNA, 2538 bp, Homo sapiens
atggagctgtggcgccaatgcacccactggctcatccagtgccgggtgctgccgcccagccaccgcgtgacctgggatggggctcaggtgtgtgaactggcccaggccctccgggatggtgtccttctgtgtcagctgcttaacaacctgctaccccatgccatcaacctgcgtgaggtcaacctgcgcccccagatgtcccagttcctgtgccttaagaacattagaaccttcctgtccacctgctgtgagaagttcggcctcaagcggagcgagctcttcgaagcctttgacctcttcgatgtgcaggattttggcaaggtcatctacaccctgtctgctctgtcctggaccccgatcgcccagaacagggggatcatgcccttccccaccgaggaggagagtgtaggtgatgaagacatctacagtggcctgtccgaccagatcgacgacacggtggaggaggatgaggacctgtatgactgcgtggagaatgaggaggcggaaggcgacgagatctatgaggacctcatgcgctcggagcccgtgtccatgccgcccaagatgacagagtatgacaagcgctgctgctgcctgcgggagatccagcagacggaggagaagtacactgacacgctgggctccatccagcagcatttcttgaagcccctgcaacggttcctgaaacctcaagacattgagatcatctttatcaacattgaggacctgcttcgtgttcatactcacttcctaaaggagatgaaggaagccctgggcacccctggcgcagccaatctctaccaggtcttcatcaaatacaaggagaggttcctcgtctatggccgctactgcagccaggtggagtcagccagcaaacacctggaccgtgtggccgcagcccgggaggacgtgcagatgaagctggaggaatgttctcagagagccaacaacgggaggttcaccctgcgggacctgctgatggtgcctatgcagcgagttctcaaatatcacctccttctccaggagctggtgaaacacacgcaggaggcgatggagaaggagaacctgcggctggccctggatgccatgagggacctggctcagtgcgtgaacgaggtcaagcgagacaacgagacactgcgacagatcaccaatttccagctgtccattgagaacctggaccagtctctggctcactatggccggcccaagatcgacggggaactcaagatcacctcggtggaacggcgctccaagatggacaggtatgccttcctgctcgacaaagctctactcatctgtaagcgcaggggagactcctatgacctcaaggactttgtaaacctgcacagcttccaggttcgggatgactcttcaggagaccgagacaacaagaagtggagccacatgttcctcctgatcgaggaccaaggtgcccagggctatgagctgttcttcaagacaagagaattgaagaagaagtggatggagcagtttgagatggccatctccaacatctatccggagaatgccaccgccaacgggcatgacttccagatgttctcctttgaggagaccacatcctgcaaggcctgtcagatgctgcttagaggtaccttctatcagggctaccgctgccatcggtgccgggcatctgcacacaaggagtgtctggggagggtccctccatgtggccgacatgggcaagatttcccaggaactatgaagaaggacaaactacatcgcagggctcaggacaaaaagaggaatgagctgggtctgcccaagatggaggtgtttcaggaatactacgggcttcctccaccccctggagccattggaccctttctacggctcaaccctggagacattgtggagctcacgaaggctgaggctgaacagaactggtgggagggcagaaatacatctactaatgaaattggctggtttccttgtaacagggtgaagccctatgtccatggccctcctcaggacctgtctgttcatctctggtacgcaggccccatggagcgggcaggggcagagagcatcctggccaaccgctcggacgggactttcttggtgcggcagagggtgaaggatgcagcagaatttgccatcagcattaaatataacgtcgaggtcaagcacattaaaatcatgacagcagaaggactgtaccggatcacagagaaaaaggctttccgggggcttacggagctggtggagttttaccagcagaactctctaaaggattgcttcaagtctctggacaccaccttgcagttccccttcaaggagcctgaaaagagaaccatcagcaggccagcagtgggaagcacaaagtattttggcacagccaaagcccgctatgacttctgcgcccgagaccgatcagagctgtcgctcaaggagggtgacatcatcaagatccttaacaagaagggacagcaaggctggtggcgaggggagatctatggccgggttggctggttccctgccaactacgtggaggaagattattctgaatactgctga

SEQ ID NO: 177 - DNA, 4011 bp, Homo sapiens
atggctacagaaattggttctcctcctcgttttttccatatgccaaggttccagcaccaggcacctcgacagctgttttataagcgacctgattttgcacaacagcaagcaatgcaacagcttacttttgatggaaaacgaatgagaaaagctgtgaaccgaaaaaccatagactacaatccatctgtaattaagtatttggagaacagaatatggcaaagagaccagagagatatgcgggcaattcagcctgatgcaggttattacaatgatctggtcccacctataggaatgttgaataatcctatgaatgcagtaacaacaaaatttgttcggacatcaacaaataaagtaaagtgtcctgtatttgttgttaggtggactccagaaggaagacgcttggtcactggagcttctagtggggagtttaccctgtggaatggactcactttcaattttgaaacaatattacaggctcacgacagcccagtgagggccatgacgtggtcacataatgacatgtggatgttgacagcagaccacggaggatatgtgaaatattggcagtcgaacatgaacaacgtcaagatgttccaggcacataaggaggcgattagagaggccagtttctcacccacggataataaatttgctacatgctctgatgacggcactgttagaatctgggactttcttcgttgccatgaggaaagaattctccgagggcatggtgctgatgtgaaatgtgtagactggcatccaaccaaagggttagttgtttcaggaagtaaagatagtcaacagccaatcaagttctgggatcccaagactgggcagagtcttgcaacacttcatgcccataaaaacacagtaatggaagtgaaattaaacctcaatggcaattggctactcacagcatcacgtgatcatctctgtaaactttttgatatcagaaacctaaaagaagagcttcaagtcttccgaggtcataagaaagaagccacagctgtggcctggcatcctgttcatgaaggactttttgccagtggagggtctgatggttctttgttattctggcatgttggggtagagaaggaagtgggtgggatggagatggctcacgaagggatgatctggagtctggcttggcatcctcttgggcatattctctgctcaggctcaaatgaccatactagcaaattctggactcgaaaccgaccaggtgataaaatgcgagatcgatataatctaaaccttttacctggaatgtctgaagatggagtagaatatgatgacctcgaacctaatagcctggcagtaattccaggaatgggaataccagaacaactaaaattagctatggaacaagaacagatggggaaagatgaatcaaatgaaattgaaatgacaattccaggtttagattggggaatggaggaagtgatgcaaaaggatcagaaaaaagtacctcagaagaaagttccttatgcaaaacccattcctgctcagttccagcaggcttggatgcaaaataaagttccaattcctgctccaaatgaggtgctgaatgacagaaaagaagacattaaattggaagagaagaaaaaaacacaagcagaaattgagcaagaaatggctacattacaatatactaacccacaacttctggagcaacttaaaattgaaagacttgcacagaaacaagttgagcaaattcagcctcctccctcatctggcacccctctcctcggaccccagccttttccaggacaaggtccaatgtctcagattcctcaaggttttcaacagccccatccatctcagcagatgccaatgaacatggctcaaatggggcctccaggtccacagggacagtttaggcctcctggaccccagggacaaatgggaccacaaggtcctccactgcatcagggaggtggggggccacaaggattcatgggaccacaggggccccagggcccgccccaggggttgccacggcctcaggacatgcatgggccccaaggaatgcagaggcatcctggacctcatggccctttgggacctcaagggccacctggaccacaaggtagttctggtcctcaaggtcatatgggtcctcagggtccacctggcccacagggtcacataggcccccaaggcccgcctggccctcagggtcacttgggcccacaggggcctccgggtactcaaggtatgcagggaccacctggtcccagaggaatgcaagggcctcctcatcctcatgggatccaaggcggaccagggtctcaagggatccaaggtcctgtgtctcagggacctctgatgggattgaatccaagaggaatgcaggggcctccaggcccccgggagaaccagggtcctgctccccaagggatgattatgggccacccgcctcaagagatgagaggacctcaccctccaggtggactactgggacacggccctcaggaaatgagaggtcctcaggagatccgaggcatgcaggggcctccaccccaaggatcaatgctgggacctccccaggaattgcgagggcctccaggctcacaaagtcagcaggggccgccccagggctctttaggacctccaccccagggtggcatgcaaggaccccccggacctcagggacagcagaacccagcaagagggccacatccatctcaagggccaataccattccagcaacagaaaacgcctctgctaggtgatgggccccgggcccccttcaaccaggaaggacagagcacaggccccccacccctgataccaggcctagggcagcagggagcacaaggtcgcattccccctctgaaccccggacaaggacctggccccaacaaaggtgactcccgcggccctccaaaccatcacatgggcccgatgtcagagaggcggcatgagcagagcggcgggcctgagcatgggcccgagagggggcctttccggggtggccaggactgcaggggtccccctgataggcgtggccctcacccagacttccccgatgacttcagcagaccagatgacttccaccctgacaagcgctttggccaccggttacgtgaatttgaggggcgaggaggacctttaccgcaagaagagaagtggaggcgagggggccctgggcctccgtttccccctgatcacagggaattcagcgagggggatggccggggtgcagcccgaggccctccgggggcatgggaaggccgcaggcccggagatgaacgtttcccccgggatcccgaggacccacgttttcgagggcgcagagaagaaagtttcagaagaggagccccgccgaggcatgagggccgtgctccccccagaggaagggatggttttcctggtcctgaagactttggtccagaggagaattttgatgcttctgaggaagcggcccgaggacgagatctcagaggtcgaggtcggggtaccccacgaggaggaaggaagggtttacttcccactcctgacgagttccctcgctttgaaggagggcggaagccagattcctgggatggaaacagagagcctgggccaggtcatgaacattttcgtgatactccccgccctgatcatccccctcacgacggtcattccccagccagcagagaacgctcctcttctctccaaggcatggacatggcatccctacctccccgaaagcgcccctggcatgatggcccaggcacttctgagcacagagagatggaggccccaggaggcccttctgaagaccgaggaggcaaaggccgagggggcccaggacctgctcagagagtgcccaaatctgggcgttccagctccttagacggagagcaccacgatggataccacagagatgaaccttttgggggccctccaggcagtggcaccccttctcgagggggccggagtggcagtaactggggtagagggagtaacatgaactctggcccgccgaggcgaggagcttcacggggtggtggaaggggtcggtag

SEQ ID NO: 178 - DNA, 366 bp, Homo sapiens
atgggcagaattttccttgatcatatcggtggtacccgtctgttttcttgtgcaaactgtgatacgatcctgaccaaccgctcagaactcatctccactcgtttcacaggcgccactggcagagcatttctttttaacaaggtagttaacctgcagtacagtgaagttcaagatcgggtcatgctcactggccgccacatggttcgagatgtgagctgcaaaaactgcaatagcaaactgggatggatctatgagtttgccactgaagacagccagcgatataaggaaggccgcgtgatcctggaacgtgctctagttcgagagagtgagggctttgaggagcatgtaccatctgataactcttga

SEQ ID NO: 179 - DNA, 2412 bp, Homo sapiens
atggactttccccagcacagccagcatgtcttggaacagctgaaccagcagcggcagctggggcttctctgtgactgcacctttgtggtggacggtgttcactttaaggctcataaagcagtgctggcggcctgcagcgagtacttcaagatgctcttcgtggaccagaaggacgtggtgcacctggacatcagtaacgcggcaggcctggggcaggtgctggagtttatgtacacggccaagctgagcctgagccctgagaacgtggatgatgtgctggccgtggccactttcctccaaatgcaggacatcatcacggcctgccatgccctcaagtcacttgctgagccggctaccagccctgggggaaatgcggaggccttggccacagaaggaggggacaagagagccaaagaggagaaggtggccaccagcacgctgagcaggctggagcaggcaggacgcagcacacccataggccccagcagggacctcaaggaggagcgcggcggtcaggcccagagtgcggccagcggtgcagagcagacagagaaagccgatgcgccccgggagccgccgcctgtggagctcaagccagaccccacgagtggcatggctgctgcagaagctgaggccgctttgtccgagagctcggagcaagaaatggaggtggagcccgcccggaaaggggaagaggagcaaaaggagcaagaggagcaagaggaggagggcgcagggccagctgaggtcaaggaggagggttcccagctggagaacggagaggcccccgaggagaacgagaatgaggagtcagcgggcacagactcggggcaggagctcggctccgaggcccggggcctgcgctcaggcacctacggcgaccgcacggagtccaaggcctacggctccgtcatccacaagtgcgaggactgtgggaaggagttcacgcacacggggaacttcaagcggcacatccgcatccacacgggggagaagcccttctcgtgccgggagtgcagcaaggccttttccgacccggccgcgtgcaaggcccatgagaagacgcacagccctctgaagccctacggctgcgaggagtgcgggaagagctaccgcctcatcagcctgctgaacctgcacaagaagcggcactcgggcgaggcgcgctaccgctgcgaggactgcggcaagctcttcaccacctcgggcaacctcaagcgccaccagctggtgcacagcggcgagaagccctaccagtgcgactactgcggccgctccttctccgaccccacttccaagatgcgccacctggagacccacgacacggacaaggagcacaagtgcccacactgcgacaagaagttcaaccaggtagggaacctgaaggcccacctgaagatccacatcgctgacgggcccctcaagtgccgagagtgtgggaagcagttcaccacctcagggaacctgaagcggcaccttcggatccacagcggggagaagccctacgtgtgcatccactgccagcgacagtttgcagaccccggcgctctgcagcggcacgtccgcattcacacaggtgagaagccatgccagtgtgtgatgtgcggtaaggccttcacccaggccagctccctcatcgcccacgtgcgccagcacaccggggagaagccctacgtctgcgagcgctgcggcaagagattcgtccagtccagccagttggccaatcatattcgccaccacgacaacatccgcccacacaagtgcagcgtgtgcagcaaggccttcgtgaacgtgggggacctgtccaagcacatcatcattcacactggagagaagccttacctgtgtgataagtgtgggcgtggcttcaaccgggtagacaacctgcgctcccacgtgaagaccgtgcaccagggcaaggcaggcatcaagatcctggagcccgaggagggcagtgaggtcagcgtggtcactgtggatgacatggtcacgctggctaccgaggcactggcagcgacagccgtcactcagctcacagtggtgccggtgggagctgcagtgacagccgatgagacggaagtcctgaaggccgagatcagcaaagctgtgaagcaagtgcaggaagaagaccccaacactcacatcctctacgcctgtgactcctgtggggacaagtttctggatgccaacagcctggctcagcatgtgcgaatccacacagcccaggcactggtcatgttccagacagacgcggacttctatcagcagtatgggccaggtggcacgtggcctgccgggcaggtgctgcaggctggggagctggtcttccgccctcgcgacggggctgagggccagcccgcactggcagagacctcccctacagctcctgaatgtcccccgcctgccgagtga

SEQ ID NO: 180 - protein, 918 aa, Homo sapiens
MPGGAGAARLCLLAFALQPLRPRAAREPGWTRGSEEGSPKLQHELIIPQWKTSESPVREKHPLKAELRVMAEGRELILDLEKNEQLFAPSYTETHYTSSGNPQTTTRKLEDHCFYHGTVRETELSSVTLSTCRGIRGLITVSSNLSYVIEPLPDSKGQHLIYRSEHLKPPPGNCGFEHSKPTTRDWALQFTQQTKKRPRRMKREDLNSMKYVELYLVADYLEFQKNRRDQDATKHKLIEIANYVDKFYRSLNIRIALVGLEVWTHGNMCEVSENPYSTLWSFLSWRRKLLAQKYHDNAQLITGMSFHGTTIGLAPLMAMCSVYQSGGVNMDHSENAIGVAATMAHEMGHNFGMTHDSADCCSASAADGGCIMAAATGHPFPKVFNGCNRRELDRYLQSGGGMCLSNMPDTRMLYGGRRCGNGYLEDGEECDCGEEEECNNPCCNASNCTLRPGAECAHGSCCHQCKLLAPGTLCREQARQCDLPEFCTGKSPHCPTNFYQMDGTPCEGGQAYCYNGMCLTYQEQCQQLWGPGARPAPDLCFEKVNVAGDTFGNCGKDMNGEHRKCNMRDAKCGKIQCQSSEARPLESNAVPIDTTIIMNGRQIQCRGTHVYRGPEEEGDMLDPGLVMTGTKCGYNHICFEGQCRNTSFFETEGCGKKCNGHGVCNNNQNCHCLPGWAPPFCNTPGHGGSIDSGPMPPESVGPVVAGVLVAILVLAVLMLMYYCCRQNNKLGQLKPSALPSKLRQQFSCPFRVSQNSGTGHANPTFKLQTPQGKRKVINTPEILRKPSQPPPRPPPDYLRGGSPPAPLPAHLSRAARNSPGPGSQIERTESSRRPPPSRPIPPAPNCIVSQDFSRPRPPQKALPANPVPGRRSLPRPGGASPLRPPGAGPQQSRPLAALAPKFPEYRSQRAGGMISSKI

SEQ ID NO: 181 - protein, 737 aa, Homo sapiens
MNGDSRAAVVTSPPPTTAPHKERYFDRVDENNPEYLRERNMAPDLRQDFNMMEQKKRVSMILQSPAFCEELESMIQEQFKKGKNPTGLLALQQIADFMTTNVPNVYPAAPQGGMAALNMSLGMVTPVNDLRGSDSIAYDKGEKLLRCKLAAFYRLADLFGWSQLIYNHITTRVNSEQEHFLIVPFGLLYSEVTASSLVKINLQGDIVDRGSTNLGVNQAGFTLHSAIYAARPDVKCVVHIHTPAGAAVSAMKCGLLPISPEALSLGEVAYHDYHGILVDEEEKVLIQKNLGPKSKVLILRNHGLVSVGESVEEAFYYIHNLVVACEIQVRTLASAGGPDNLVLLNPEKYKAKSRSPGSPVGEGTGSPPKWQIGEQEFEALMRMLDNLGYRTGYPYRYPALREKSKKYSDVEVPASVTGYSFASDGDSGTCSPLRHSFQKQQREKTRWLNSGRGDEASEEGQNGSSPKSKTKWTKEDGHRTSTSAVPNLFVPLNTNPKEVQEMRNKIREQNLQDIKTAGPQSQVLCGVVMDRSLVQGELVTASKAIIEKEYQPHVIVSTTGPNPFTTLTDRELEEYRREVERKQKGSEENLDEAREQKEKSPPDQPAVPHPPPSTPIKLEEDLVPEPTTGDDSDAATFKPTLPDLSPDEPSEALGFPMLEKEEEAHRPPSPTEAPTEASPEPAPDPAPVAEEAAPSAVEEGAAADPGSDGSPGKSPSKKKKKFRTPSFLKKSKKKSDS

SEQ ID NO: 182 - protein, 886 aa, Homo sapiens
MRGFNLLLFWGCCVMHSWEGHIRPTRKPNTKGNNCRDSTLCPAYATCTNTVDSYYCACKQGFLSSNGQNHFKDPGVRCKDIDECSQSPQPCGPNSSCKNLSGRYKCSCLDGFSSPTGNDWVPGKPGNFSCTDINECLTSSVCPEHSDCVNSMGSYSCSCQVGFISRNSTCEDVDECADPRACPEHATCNNTVGNYSCFCNPGFESSSGHLSFQGLKASCEDIDECTEMCPINSTCTNTPGSYFCTCHPGFAPSNGQLNFTDQGVECRDIDECRQDPSTCGPNSICTNALGSYSCGCIAGFHPNPEGSQKDGNFSCQRVLFKCKEDVIPDNKQIQQCQEGTAVKPAYVSFCAQINNIFSVLDKVCENKTTVVSLKNTTESFVPVLKQISTWTKFTKEETSSLATVFLESVESMTLASFWKPSANITPAVRTEYLDIESKVINKECSEENVTLDLVAKGDKMKIGCSTIEESESTETTGVAFVSFVGMESVLNERFFKDHQAPLTTSEIKLKMNSRVVGGIMTGEKKDGFSDPIIYTLENIQPKQKFERPICVSWSTDVKGGRWTSFGCVILEASETYTICSCNQMANLAVIMASGELTMDFSLYIISHVGIIISLVCLVLAIATFLLCRSIRNHNTYLHLHLCVCLLLAKTLFLAGIHKTDNKMGCAIIAGFLHYLFLACFFWMLVEAVILFLMVRNLKVVNYFSSRNIKMLHICAFGYGLPMLVVVISASVQPQGYGMHNRCWLNTETGFIWSFLGPVCTVIVINSLLLTWTLWILRQRLSSVNAEVSTLKDTRLLTFKAFAQLFILGCSWVLGIFQIGPVAGVMAYLFTIINSLQGAFIFLIHCLLNGQVREEYKRWITGKTKPSSQSQTSRILLSSMPSASKTG

SEQ ID NO: 183 - protein, 147 aa, Homo sapiens
MSQTRDLQGGKAFGLLKAQQEERLDEINKQFLDDPKYSSDEDLPSKLEGFKEKYMEFDLNGNGDIDIMSLKRMLEKLGVPKTHLELKKLIGEVSSGSGETFSYPDFLRMMLGKRSAILKMILMYEEKAREKEKPTGPPAKKAISELP

SEQ ID NO: 184 - protein, 81 aa, Homo sapiens
MGQLCCFPFSRDEGKISEKNGGEPDDAELVRLSKRLVENAVLKAVQQYLEETQNKNKPGEGSSVKTEAADQNGNDNENNRK

SEQ ID NO: 185 - protein, 480 aa, Homo sapiens [sequence omitted]

SEQ ID NO: 186 - protein, 292 aa, Homo sapiens
MNPFWSMSTSSVRKRSEGEEKTLTGDVKTSPPRTAPKKQLPSIPKNALPITKPTSPAPAAQSTNGTHASYGPFYLEYSLLAEFTLVVKQKLPGVYVQPSYRSALMWFGVIFIRHGLYQDGVFKFTVYIPDNYPDGDCPRLVFDIPVFHPLVDPTSGELDVKRAFAKWRRNHNHIWQVLMYARRVFYKIDTASPLNPEAAVLYEKDIQLFKSKVVDSVKVCTARLFDQPKIEDPYAISFSPWNPSVHDEAREKMLTQKKPEEQHNKSVHVAGLSWVKPGSVQPFSKEEKTVAT

SEQ ID NO: 187 - protein, 364 aa, Homo sapiens
MPYQYPALTPEQKKELSDIAHRIVAPGKGILAADESTGSIAKRLQSIGTENTEENRRFYRQLLLTADDRVNPCIGGVILFHETLYQKADDGRPFPQVIKSKGGVVGIKVDKGVVPLAGTNGETTTQGLDGLSERCAQYKKDGADFAKWRCVLKIGEHTPSALAIMENANVLARYASICQQNGIVPIVEPEILPDGDHDLKRCQYVTEKVLAAVYKALSDHHIYLEGTLLKPNMVTPGHACTQKFSHEEIAMATVTALRRTVPPAVTGITFLSGGQSEEEASINLNAINKCPLLKPWALTFSYGRALQASALKAWGGKKENLKAAQEEYVKRALANSLACQGKYTPSGQAGAAASESLFVSNHAY

SEQ ID NO: 188 - protein, 334 aa, Homo sapiens
MEAAHFFEGTEKLLEVWFSRQQPDANQGSGDLRTIPRSEWDILLKDVQCSIISVTKTDKQEAYVLSESSMFVSKRRFILKTCGTTLLLKALVPLLKLARDYSGFDSIQSFFYSRKNFMKPSHQGYPHRNFQEEIEFLNAIFPNGAAYCMGRMNSDCWYLYTLDFPESRVISQPDQTLEILMSELDPAVMDQFYMKDGVTAKDVTRESGIRDLIPGSVIDATMFNPCGYSMNGMKSDGTYWTIHITPEPEFSYVSFETNLSQTSYDDLIRKVVEVFKPGKFVTTLFVNQSSKCRTVLASPQKIEGFKRLDCQSAMFNDYNFVFTSFAKKQQQQQS

SEQ ID NO: 189 - protein, 163 aa, Homo sapiens
MDALEGESFALSFSSASDAEFDAVVGYLEDIIMDDEFQLLQRNFMDKYYLEFEDTEENKLIYTPIFNEYISLVEKYIEEQLLQRIPEFNMAAFTTTLQHHKDEVAGDIFDMLLTFTDFLAFKEMFLDYRAEKEGRGLDLSSGLVVTSLCKSSSLPASQNNLRH

SEQ ID NO: 190 - protein, 839 aa, Homo sapiens
MAQFDTEYQRLEASYSDSPPGEEDLLVHVAEGSKSPWHHIENLDLFFSRVYNLHQKNGFTCMLIGEIFELMQFLFVVAFTTFLVSCVDYDILFANKMVNHSLHPTEPVKVTLPDAFLPAQVCSARIQENGSLITILVIAGVFWIHRLIKFIYNICCYWEIHSFYLHALRIPMSALPYCTWQEVQARIVQTQKEHQICIHKRELTELDIYHRILRFQNYMVALVNKSLLPLRFRLPGLGEAVFFTRGLKYNFELILFWGPGSLFLNEWSLKAEYKRGGQRLELAQRLSNRILWIGIANFLLCPLILIWQILYAFFSYAEVLKREPGALGARCWSLYGRCYLRHFNELEHELQSRLNRGYKPASKYMNCFLSPLLTLLAKNGAFFAGSILAVLIALTIYDEDVLAVEHVLTTVTLLGVTVTVCRSFIPDQHMVFCPEQLLRVILAHIHYMPDHWQGNAHRSQTRDEFAQLFQYKAVFILEELLSPIVTPLILIFCLRPRALEIIDFFRNFTVEVVGVGDTCSFAQMDVRQHGHPQWLSAGQTEASVYQQAEDGKTELSLMHFAITNPGWQPPRESTAFLGFLKEQVQRDGAAASLAQGGLLPENALFTSIQSLQSESEPLSLIANVVAGSSCRGPPLPRDLQGSRHRAEVASALRSFSPLQPGQAPTGRAHSTMTGSGVDARTASSGSSVWEGQLQSLVLSEYASTEMSLHALYMHQLHKQQAQAEPERHVWHRRESDESGESAPDEGGEGARAPQSIPRSASYPCAAPRPGAPETTALHGGFQRRYGGITDPGTVPRVPSHFSRLPLGGWAEDGQSASRHPEPVPEEGSEDELPPQVHKV

SEQ ID NO: 191 - protein, 1226 aa, Homo sapiens
MDREERKTINQGQEDEMEIYGYNLSRWKLAIVSLGVICSGGFLLLLLYWMPEWRVKATCVRAAIKDCEVVLLRTTDEFKMWFCAKIRVLSLETYPVSSPKSMSNKLSNGHAVCLIENPTEENRHRISKYSQTESQQIRYFTHHSVKYFWNDTIHNFDFLKGLDEGVSCTSIYEKHSAGLTKGMHAYRKLLYGVNEIAVKVPSVFKLLIKEVLNPFYIFQLFSVILWSTDEYYYYALAIVVMSIVSIVSSLYSIRKQYVMLHDMVATHSTVRVSVCRVNEEIEEIFSTDLVPGDVMVIPLNGTIMPCDAVLINGTCIVNESMLTGESVPVTKTNLPNPSVDVKGIGDELYNPETHKRHTLFCGTTVIQTRFYTGELVKAIVVRTGFSTSKGQLVRSILYPKPTDFKLYRDAYLFLLCLVAVAGIGFIYTIINSILNEVQVGVIIIESLDIITITVPPALPAAMTAGIVYAQRRLKKIGIFCISPQRINICGQLNLVCFDKTGTLTEDGLDLWGIQRVENARFLSPEENVCNEMLVKSQFVACMATCHSLTKIEGVLSGDPLDLKMFEAIGWILEEATEEETALHNRIMPTVVRPPKQLLPESTPAGNQEMELFELPATYEIGIVRQFPFSSALQRMSVVARVLGDRKMDAYMKGAPEAIAGLCKPETVPVDFQNVLEDFTKQGFRVIALAHRKLESKLTWHKVQNISRDAIENNMDFMGLIIMQNKLKQETPAVLEDLHKANIRTVMVTGDSMLTAVSVARDCGMILPQDKVIIAEALPPKDGKVAKINWHYADSLTQCSHPSAIDPEAIPVKLVHDSLEDLQMTRYHFAMNGKSFSVILEHFQDLVPKLMLHGTVFARMAPDQKTQLIEALQNVDYFVGMCGDGANDCGALKRAHGGISLSELEASVASPFTSKTPSISCVPNLIREGRAALITSFCVFKFMALYSIIQYFSVTLLYSILSNLGDFQFLFIDLAIILVVVFTMSLNPAWKELVAQRPPSGLISGALLFSVLSQIIICIGFQSLGFFWVKQQPWYEVWHPKSDACNTTGSGFWNSSHVDNETELDEHNIQNYENTTVFFISSFQYLIVAIAFSKGKPFRQPCYKNYFFVFSVIFLYIFILFIMLYPVASVDQVLQIVCVPYQWRVTMLIIVLVNAFVSITVEESVDRWGKCCLPWALGCRKKTPKAKYMYLAQELLVDPEWPPKPQTTTEAKALVKENGSCQIITIT

SEQ ID NO: 192 - protein, 831 aa, Homo sapiens
MGELFRSEEMTLAQLFLQSEAAYCCVSELGELGKVQFRDLNPDVNVFQRKFVNEVRRCEEMDRKLRFVEKEIRKANIPIMDTGENPEVPFPRDMIDLEANFEKIENELKEINTNQEALKRNFLELTELKFILRKTQQFFDEMADPDLLEESSSLLEPSEMGRGTPLRLGFVAGVINRERIPTFERMLWRVCRGNVFLRQAEIENPLEDPVTGDYVHKSVFIIFFQGDQLKNRVKKICEGFRASLYPCPETPQERKEMASGVNTRIDDLQMVLNQTEDHRQRVLQAAAKNIRVWFIKVRKMKAIYHTLNLCNIDVTQKCLIAEVWCPVTDLDSIQFALRRGTEHSGSTVPSILNRMQTNQTPPTYNKTNKFTYGFQNIVDAYGIGTYREINPAPYTIITFPFLFAVMFGDFGHGILMTLFAVWMVLRESRILSQKNENEMFSTVFSGRYIILLMGVFSMYTGLIYNDCFSKSLNIFGSSWSVRPMFTYNWTEETLRGNPVLQLNPALPGVFGGPYPFGIDPIWNIATNKLTFLNSFKMKMSVILGIIHMLFGVSLSLFNHIYFKKPLNIYFGFIPEIIFMTSLFGYLVILIFYKWTAYDAHTSENAPSLLIHFINMFLFSYPESGYSMLYSGQKGIQCFLVVVALLCVPWMLLFKPLVLRRQYLRRKHLGTLNFGGIRVGNGPTEEDAEIIQHDQLSTHSEDADEFDFGDTMVHQAIHTIEYCLGCISNTASYLRLWALSLAHAQLSEVLWTMVIHIGLSVKSLAGGLVLFFFFTAFATLTVAILLIMEGLSAFLHALRLHWVEFQNKFYSGTGFKFLPFSFEHIREGKFEE

SEQ ID NO: 193 - protein, 1192 aa, Homo sapiens
MFCSEKKLREVERIVKANDREYNEKFQYADNRIHTSKYNILTFLPINLFEQFQRVANAYFLCLLILQLIPEISSLTWFTTIVPLVLVITMTAVKDATDDYFRHKSDNQVNNRQSEVLINSKLQNEKWMNVKVGDIIKLENNQFVAADLLLLSSSEPHGLCYVETAELDGETNLKVRHALSVTSELGADISRLAGFDGIVVCEVPNNKLDKFMGILSWKDSKHSLNNEKIILRGCILRNTSWCFGMVIFAGPDTKLMQNSGKTKFKRTSIDRLMNTLVLWIFGFLICLGIILAIGNSIWESQTGDQFRTFLFWNEGEKSSVFSGFLTFWSYIIILNTVVPISLYVSVEVIRLGHSYFINWDRKMYYSRKAIPAVARTTTLNEELGQIEYIFSDKTGTLTQNIMTFKRCSINGRIYGEVHDDLDQKTEITQEKEPVDFSVKSQADREFQFFDHHLMESIKMGDPKVHEFLRLLALCHTVMSEENSAGELIYQVQSPDEGALVTAARNFGFIFKSRTPETITIEELGTLVTYQLLAFLDFNNTRKRMSVIVRNPEGQIKLYSKGADTILFEKLHPSNEVLLSLTSDHLSEFAGEGLRTLAIAYRDLDDKYFKEWHKMLEDANAATEERDERIAGLYEEIERDLMLLGATAVEDKLQEGVIETVTSLSLANIKIWVLTGDKQETAINIGYACNMLTDDMNDVFVIAGNNAVEVREELRKAKQNLFGQNRNFSNGHVVCEKKQQLELDSIVEETITGDYALIINGHSLAHALESDVKNDLLELACMCKTVICCRVTPLQKAQVVELVKKYRNAVTLAIGDGANDVSMIKSAHIGVGISGQEGLQAVLASDYSFAQFRYLQRLLLVHGRWSYFRMCKFLCYFFYKNFAFTLVHFWFGFFCGFSAQTVYDQWFITLFNIVYTSLPVLAMGIFDQDVSDQNSVDCPQLYKPGQLNLLFNKRKFFICVLHGIYTSLVLFFIPYGAFYNVAGEDGQHIADYQSFAVTMATSLVIVVSVQIALDTSYWTFINHVFIWGSIAIYFSILFTMHSNGIFGIFPNQFPFVGNARHSLTQKCIWLVILLTTVASVMPVVAFRFLKVDLYPTLSDQIRRWQKAQKKARPPSSRRPRTRRSSSRRSGYAFAHQEGYGELITSGKNMRAKNPPPTSGLEKTHYNSTSWIENLCKKTTDTVSSFSQDKTVKL

SEQ ID NO: 194 - protein, 651 aa, Homo sapiens
MGKKHKKHKSDKHLYEEYVEKPLKLVLKVGGNEVTELSTGSSGHDSSLFEDKNDHDKHKDRKRKKRKKGEKQIPGEEKGRKRRRVKEDKKKRDRDRVENEAEKDLQCHAPVRLDLPPEKPLTSSLAKQEEVEQTPLQEALNQLMRQLQRKDPSAFFSFPVTDFIAPGYSMIIKHPMDFSTMKEKIKNNDYQSIEELKDNFKLMCTNAMIYNKPETIYYKAAKKLLHSGMKILSQERIQSLKQSIDFMADLQKTRKQKDGTDTSQSGEDGGCWQREREDSGDAEAHAFKSPSKENKKKDKDMLEDKFKSNNLEREQEQLDRIVKESGGKLTRRLVNSQCEFERRKPDGTTTLGLLHPVDPIVGEPGYCPVRLGMTTGRLQSGVNTLQGFKEDKRNKVTPVLYLNYGPYSSYAPHYDSTFANISKDDSDLIYSTYGEDSDLPSDFSIHEFLATCQDYPYVMADSLLDVLTKGGHSRTLQEMEMSLPEDEGHTRTLDTAKEMEITEVEPPGRLDSSTQDRLIALKAVTNFGVPVEVFDSEEAEIFQKKLDETTRLLRELQEAQNERLSTRPPPNMICLLGPSYREMHLAEQVTNNLKELAQQVTPGDIVSTYGVRKAMGISIPSPVMENNFVDLTEDTEEPKKTDVAECGPGGS

SEQ ID NO: 195 - protein, 158 aa, Homo sapiens
MSHGKGTDMLPEIAAAVGFLSSLLRTRGCVSEQRLKVFSGALQEALTEHYKHHWFPEKPSKGSGYRCIRINHKMDPIISRVASQIGLSQPQLHQLLPSELTLWVDPYEVSYRIGEDGSICVLYEEAPLAASCGLLTCKNQVLLGRSSPSKNYVMAVSS

SEQ ID NO: 196 - protein, 290 aa, Homo sapiens
MVLLHVKRGDESQFLLQAPGSTELEELTVQVARVYNGRLKVQRLCSEMEELAEHGIFLPPNMQGLTDDQIEELKLKDEWGEKCVPSGGAVFKKDDIGRRNGQAPNEKMKQVLKKTIEEAKAIISKKQVEAGVCVTMEMVKDALDQLRGAVMIVYPMGLPPYDPIRMEFENKEDLSGTQAGLNVIKEAEAQLWWAAKELRRTKKLSDYVGKNEKTKIIAKIQQRGQGAPAREPIISSEEQKQLMLYYHRRQEELKRLEENDDDAYLNSPWADNTALKRHFHGVKDIKWRPR

SEQ ID NO: 197 - protein, 75 aa, Homo sapiens
MERSFVWLSCLDSDSCNLTFRLGEVESHACSPSLLWNLLTQYLPPGAGHILRTYNFPVLSCVSSCHLIGGKMPEN

SEQ ID NO: 198 - protein, 289 aa, Homo sapiens
MELLCHEVDPVRRAVRDRNLLRDDRVLQNLLTIEERYLPQCSYFKCVQKDIQPYMRRMVATWMLEVCEEQKCEEEVFPLAMNYLDRFLAGVPTPKSHLQLLGAVCMFLASKLKETSPLTAEKLCIYTDNSIKPQELLEWELVVLGKLKWNLAAVTPHDFIEHILRKLPQQREKLSLIRKHAQTFIALCATDFKFAMYPPSMIATGSVGAAICGLQQDEEVSSLTCDALTELLAKITNTDVDCLKACQEQIEAVLLNSLQQYRQDQRDGSKSEDELDQASTPTDVRDIDL

SEQ ID NO: 199 - protein, 742 aa, Homo sapiens
MDKFWWHAAWGLCLVPLSLAQIDLNITCRFAGVFHVEKNGRYSISRTEAADLCKAFNSTLPTMAQMEKALSIGFETCRYGFIEGHVVIPRIHPNSICAANNTGVYILTSNTSQYDTYCFNASAPPEEDCTSVTDLPNAFDGPITITIVNRDGTRYVQKGEYRTNPEDIYPSNPTDDDVSSGSSSERSSTSGGYIFYTFSTVHPIPDEDSPWITDSTDRIPATTLMSTSATATETATKRQETWDWFSWLFLPSESKNHLHTTTQMAGTSSNTISAGWEPNEENEDERDRHLSFSGSGIDDDEDFISSTISTTPRAFDHTKQNQDWTQWNPSHSNPEVLLQTTTRMTDVDRNGTTAYEGNWNPEAHPPLIHHEHHEEEETPHSTSTIQATPSSTTEETATQKEQWFGNRWHEGYRQTPKEDSHSTTGTAAASAHTSHPMQGRTTPSPEDSSWTDFFNPISHPMGRGHQAGRRMDMDSSHSITLQPTANPNTGLVEDLDRTGPLSMTTQQSNSQSFSTSHEGLEEDKDHPTTSTLTSSNRNDVTGGRRDPNHSEGSTTLLEGYTSHYPHTKESRTFIPVTSAKTGSFGVTAVTVGDSNSNVNRSLSGDQDTFHPSGGSHTTHGSESDGHSHGSQEGGANTTSGPIRTPQIPEWLIILASLLALALILAVCIAVNSRRRCGQKKKLVINSGNGAVEDRKPSGLNGEASKSQEMVHLVNKESSETPDQFMTADETRNLQNVDMKIGV

SEQ ID NO: 200 - protein, 128 aa, Homo sapiens
MGIQGGSVLFGLLLVLAVFCHSGHSLQCYNCPNPTADCKTAVNCSSDFDACLITKAGLQVYNKCWKFEHCNFNDVTTRLRENELTYYCCKKDLCNFNEQLENGGTSLSEKTVLLLVTPFLAAAWSLHP

SEQ ID NO: 201 - protein, 594 aa, Homo sapiens
MAAESGELIGACEFMKDRLYFATLRNRPKSTVNTHYFSIDEELVYENFYADFGPLNLAMVYRYCCKLNKKLKSYSLSRKKIVHYTCFDQRKRANAAFLIGAYAVIYLKKTPEEAYRALLSGSNPPYLPFRDASFGNCTYNLTILDCLQGIRKGLQHGFFDFETFDVDEYEHYERVENGDFNWIVPGKFLAFSGPHPKSKIENGYPLHAPEAYFPYFKKHNVTAVVRLNKKIYEAKRFTDAGFEHYDLFFIDGSTPSDNIVRRFLNICENTEGAIAVHCKAGLGRTGTLIACYVMKHYRFTHAEIIAWIRICRPGSIIGPQQHFLEEKQASLWVQGDIFRSKLKNRPSSEGSINKILSGLDDMSIGGNLSKTQNMERFGEDNLEDDDVEMKNGITQGDKLRALKSQRQPRTSPSCAFRSDDTKGHPRAVSQPFRLSSSLQGSAVTLKTSKMALSPSATAKRINRTSLSSGATVRSFSINSRLASSLGNLNAATDDPENKKTSSSSKAGFTASPFTNLLNGSSQPTTRNYPELNNNQYNRSSNSNGGNLNSPPGPHSAKTEEHTTILRPSYTGLSSSSARFLSRSIPSLQSEYVHY

SEQ ID NO: 202 - protein, 537 aa, Homo sapiens
MGATGAAEPLQSVLWVKQQRCAVSLEPARALLRWWRSPGPGAGAPGADACSVPVSEIIAVEETDVHGKHQGSGKWQKMEKPYAFTVHCVKRARRHRWKWAQVTFWCPEEQLCHLWLQTLREMLEKLTSRPKHLLVFINPFGGKGQGKRIYERKVAPLFTLASITTDIIVTEHANQAKETLYEINIDKYDGIVCVGGDGMFSEVLHGLIGRTQRSAGVDQNHPRAVLVPSSLRIGIIPAGSTDCVCYSTVGTSDAETSALHIVVGDSLAMDVSSVHHNSTLLRYSVSLLGYGFYGDIIKDSEKKRWLGLARYDFSGLKTFLSHHCYEGTVSFLPAQHTVGSPRDRKPCRAGCFVCRQSKQQLEEEQKKALYGLEAAEDVEEWQVVCGKFLAINATNMSCACRRSPRGLSPAAHLGDGSSDLILIRKCSRFNFLRFLIRHTNQQDQFDFTFVEVYRVKKFQFTSKHMEDEDSDLKEGGKKRFGHICSSHPSCCCTVSNSSWNCDGEVLHSPAIEVRVHCQLVRLFARGIEENPKPDSHS

SEQ ID NO: 203 - protein, 406 aa, Homo sapiens
MAAGAGAGSAPRWLRALSEPLSAAQLRRLEEHRYSAAGVSLLEPPLQLYWTWLLQWIPLWMAPNSITLLGLAVNVVTTLVLISYCPTATEEAPYWTYLLCALGLFIYQSLDAIDGKQARRTNSCSPLGELFDHGCDSLSTVFMAVGASIAARLGTYPDWFFFCSFIGMFVFYCAHWQTYVSGMLRFGKVDVTEIQIALVIVFVLSAFGGATMWDYTIPILEIKLKILPVLGFLGGVIFSCSNYFHVILHGGVGKNGSTIAGTSVLSPGLHIGLIIILAIMIYKKSATDVFEKHPCLYILMFGCVFAKVSQKLVVAHMTKSELYLQDTVFLGPGLLFLDQYFNNFIDEYVVLWMAMVISSFDMVIYFSALCLQISRHLHLNIFKTACHQAPEQVQVLSSKSHQNNMD

SEQ ID NO: 204 - protein, 219 aa, Homo sapiens
MNSSKSSETQCTERGCFSSQMFLWTVAGIPILFLSACFITRCVVTFRIFQTCDEKKFQLPENFTELSCYNYGSGSVKNCCPLNWEYFQSSCYFFSTDTISWALSLKNCSAMGAHLVVINSQEEQEFLSYKKPKMREFFIGLSDQVVEGQWQWVDGTPLTKSLSFWDVGEPNNIATLEDCATMRDSSNPRQNWNDVTCFLNYFRICEMVGINPLNKGKSL

SEQ ID NO: 205 - protein, 449 aa, Homo sapiens
MMKTLLLFVGLLLTWESGQVLGDQTVSDNELQEMSNQGSKYVNKEIQNAVNGVKQIKTLIEKTNEERKTLLSNLEEAKKKKEDALNETRESETKLKELPGVCNETMMALWEECKPCLKQTCMKFYARVCRSGSGLVGRQLEEFLNQSSPFYFWMNGDRIDSLLENDRQQTHMLDVMQDHFSRASSIIDELFQDRFFTREPQDTYHYLPFSLPHRRPHFFFPKSRIVRSLMPFSPYEPLNFHAMFQPFLEMIHEAQQAMDIHFHSPAFQHPPTEFIREGDDDRTVCREIRHNSTGCLRMKDQCDKCREILSVDCSTNNPSQAKLRRELDESLQVAERLTRKYNELLKSYQWKMLNTSSLLEQLNEQFNWVSRLANLTQGEDQYYLRVTTVASHTSDSDVPSGVTEVVVKLFDSDPITVTVPVEVSRKNPKFMETVAEKALQEYRKKHREE

SEQ ID NO: 206 - protein, 177 aa, Homo sapiens
MSSNECFKCGRSGHWARECPTGGGRGRGMRSRGRGGFTSDRGFQFVSSSLPDICYRCGESGHLAKDCDLQEDACYNCGRGGHIAKDCKEPKREREQCCYNCGKPGHLARDCDHADEQKCYSCGEFGHIQKDCTKVKCYRCGETGHVAINCSKTSEVNCYRCGESGHLARECTIEATA

SEQ ID NO: 207 - protein, 199 aa, Homo sapiens
MRFRFCGDLDCPDWVLAEISTLAKMSSVKLRLLCSQVLKELLGQGIDYEKILKLTADAKFESGDVKATVAVLSFILSSAAKHSVDGESLSSELQQLGLPKEHAASLCRCYEEKQSPLQKHLRVCSLRMNRLAGVGWRVDYTLSSSLLQSVEEPMVHLRLEVAAAPGTPAQPVAMSLSADKFQVLLAELKQAQTLMSSLG

SEQ ID NO: 208 - protein, 238 aa, Homo sapiens
MAARTGHTALRRVVSGCRPKSATAAGAQAPVRNGRYLASCGILMSRTLPLHTSILPKEICARTFFKITAPLINKRKEYSERRILGYSMQEMYDVVSGVEDYKHFVPWCKKSDVISKRSGYCKTRLEIGFPPVLERYTSVVTLVKPHLVKASCTDGRLFNHLETIWRFSPGLPGYPRTCTLDFSISFEFRSLLHSQLATLFFDEVVKQMVAAFERRACKLYGPETNIPRELMLHEVHHT

SEQ ID NO: 209 - protein, 129 aa, Homo sapiens
MASRLLRGAGTLAAQALRARGPSGAAAMRSMASGGGVPTDEEQATGLEREIMLAAKKGLDPYNVLAPKGASGTREDPNLVPSISNKRIVGCICEEDNTSVVWFWLHKGEAQRCPRCGAHYKLVPQQLAH

SEQ ID NO: 210 - protein, 476 aa, Homo sapiens
MVGAMWKVIVSLVLLMPGPCDGLFRSLYRSVSMPPKGDSGQPLFLTPYIEAGKIQKGRELSLVGPFPGLNMKSYAGFLTVNKTYNSNLFFWFFPAQIQPEDAPVVLWLQGGPGGSSMFGLFVEHGPYVVTSNMTLRDRDFPWTTTLSMLYIDNPVGTGFSFTDDTHGYAVNEDDVARDLYSALIQFFQIFPEYKNNDFYVTGESYAGKYVPAIAHLIHSLNPVREVKINLNGIAIGDGYSDPESIIGGYAEFLYQIGLLDEKQKKYFQKQCHECIEHIRKQNWFEAFEILDKLLDGDLTSDPSYFQNVTGCSNYYNFLRCTEPEDQLYYVKFLSLPEVRQAIHVGNQTFNDGTIVEKYLREDTVQSVKPWLTEIMNNYKVLIYNGQLDIIVAAALTERSLMGMDWKGSQEYKKAEKKVWKIFKSDSEVAGYIRQAGDFHQVIIRGGGHILPYDQPLRAFDMINRFIYGKGWDPYVG

SEQ ID NO: 211 - protein, 271 aa, Homo sapiens
MEHGSIITQARREDALVLTKQGLVSKSSPKKPRGRNIFKALFCCFRAQHVGQSSSSTELAAYKEEANTIAKSDLLQCLQYQFYQIPGTCLLPEVTEEDQGRICVVIDLDETLVHSSFKPINNADFIVPIEIEGTTHQVYVLKRPYVDEFLRRMGELFECVLFTASLAKYADPVTDLLDRCGVFRARLFRESCVFHQGCYVKDLSRLGRDLRKTLILDNSPASYIFHPENAVPVQSWFDDMADTELLNLIPIFEELSGAEDVYTSLGQLRAP

SEQ ID NO: 212 - protein, 498 aa, Homo sapiens
MTSSPRAPPGEQGRGGAEMIRAAPPPLFLLLLLLLLLVSWASRGEAAPDQDEIQRLPGLAKQPSFRQYSGYLKGSGSKHLHYWFVESQKDPENSPVVLWLNGGPGCSSLDGLLTEHGPFLVQPDGVTLEYNPYSWNLIANVLYLESPAGVGFSYSDDKFYATNDTEVAQSNFEALQDFFRLFPEYKNNKLFLTGESYAGIYIPTLAVLVMQDPSMNLQGLAVGNGLSSYEQNDNSLVYFAYYHGLLGNRLWSSLQTHCCSQNKCNFYDNKDLECVTNLQEVARIVGNSGLNIYNLYAPCAGGVPSHFRYEKDTVVVQDLGNIFTRLPLKRMWHQALLRSGDKVRMDPPCTNTTAASTYLNNPYVRKALNIPEQLPQWDMCNFLVNLQYRRLYRSMNSQYLKLLSSQKYQILLYNGDVDMACNFMGDEWFVDSLNQKMEVQRRPWLVKYGDSGEQIAGFVKEFSHIAFLTIKGAGHMVPTDKPLAAFTMFSRFLNKQPY

SEQ ID NO: 213 - protein, 463 aa, Homo sapiens
MGAGPSLLLAALLLLLSGDGAVRCDTPANCTYLDLLGTWVFQVGSSGSQRDVNCSVMGPQEKKVVVYLQKLDTAYDDLGNSGHFTIIYNQGFEIVLNDYKWFAFFKYKEEGSKVTTYCNETMTGWVHDVLGRNWACFTGKKVGTASENVYVNIAHLKNSQEKYSNRLYKYDHNFVKAINAIQKSWTATTYMEYETLTLGDMIRRSGGHSRKIPRPKPAPLTAEIQQKILHLPTSWDWRNVHGINFVSPVRNQASCGSCYSFASMGMLEARIRILTNNSQTPILSPQEVVSCSQYAQGCEGGFPYLIAGKYAQDFGLVEEACFPYTGTDSPCKMKEDCFRYYSSEYHYVGGFYGGCNEALMKLELVHHGPMAVAFEVYDDFLHYKKGIYHHTGLRDPFNPFELTNHAVLLVGYGTDSASGMDYWIVKNSWGTGWGENGYFRIRRGTDECAIESIAVAATPIPKL

SEQ ID NO: 214 - protein, 335 aa, Homo sapiens
MWATLPLLCAGAWLLGVPVCGAAELCVNSLEKFHFKSWMSKHRKTYSTEEYHHRLQTFASNWRKINAHNNGNHTFKMALNQFSDMSFAEIKHKYLWSEPQNCSATKSNYLRGTGPYPPSVDWRKKGNFVSPVKNQGACGSCWTFSTTGALESAIAIATGKMLSLAEQQLVDCAQDFNNHGCQGGLPSQAFEYILYNKGIMGEDTYPYQGKDGYCKFQPGKAIGFVKDVANITIYDEEAMVEAVALYNPVSFAFEVTQDFMMYRTGIYSSTSCHKTPDKVNHAVLAVGYGEKNGIPYWIVKNSWGPQWGMNGYFLIERGKNMCGLAACASYPIPLV

SEQ ID NO: 215 - protein, 570 aa, Homo sapiens
MGNWAVNEGLSIFVILVWLGLNVFLFVWYYRVYDIPPKFFYTRKLLGSALALARAPAACLNFNCMLILLPVCRNLLSFLRGSSACCSTRVRRQLDRNLTFHKMVAWMIALHSAIHTIAHLFNVEWCVNARVNNSDPYSVALSELGDRQNESYLNFARKRIKNPEGGLYLAVTLLAGITGVVITLCLILIITSSTKTIRRSYFEVFWYTHHLFVIFFIGLAIHGAERIVRGQTAESLAVHNITVCEQKISEWGKIKECPIPQFAGNPPMTWKWIVGPMFLYLCERLVRFWRSQQKVVITKVVTHPFKTIELQMKKKGFKMEVGQYIFVKCPKVSKLEWHPFTLTSAPEEDFFSIHIRIVGDWTEGLFNACGCDKQEFQDAWKLPKIAVDGPFGTASEDVFSYEVVMLVGAGIGVTPFASILKSVWYKYCNNATNLKLKKIYFYWLCRDTHAFEWFADLLQLLESQMQERNNAGFLSYNIYLTGWDESQANHFAVHHDEEKDVITGLKQKTLYGRPNWDNEFKTIASQHPNTRIGVFLCGPEALAETLSKQSISNSESGPRGVHFIFNKENF

SEQ ID NO: 216 - protein, 462 aa, Homo sapiens
MLDFAIFAVTFLLALVGAVLYLYPASRQAAGIPGITPTEEKDGNLPDIVNSGSLHEFLVNLHERYGPVVSFWFGRRLVVSLGTVDVLKQHINPNKTSDPFETMLKSLLRYQSGGGSVSENHMRKKLYENGVTDSLKSNFALLLKLSEELLDKWLSYPETQHVPLSQHMLGFAMKSVTQMVMGSTFEDDQEVIRFQKNHGTVWSEIGKGFLDGSLDKNMTRKKQYEDALMQLESVLRNIIKERKGRNFSQHIFIDSLVQGNLNDQQILEDSMIFSLASCIITAKLCTWAICFLTTSEEVQKKLYEEINQVFGNGPVTPEKIEQLRYCQHVLCETVRTAKLTPVSAQLQDIEGKIDRFIIPRETLVLYALGVVLQDPNTWPSPHKFDPDRFDDELVMKTFSSLGFSGTQECPELRFAYMVTTVLLSVLVKRLHLLSVEGQVIETKYELVTSSREEAWITVSKRY

SEQ ID NO: 217 - protein, 318 aa, Homo sapiens
MSAHNRGTELDLSWISKIQVNHPAVLRRAEQIQARRTVKKEWQAAWLLKAVTFIDLTTLSGDDTSSNIQRLCYKAKYPIREDLLKALNMHDKGITTAAVCVYPARVCDAVKALKAAGCNIPVASVAAGFPAGQTHLKTRLEEIRLAVEDGATEIDVVINRSLVLTGQWEALYDEIRQFRKACGEAHLKTILATGELGTLTNVYKASMIAMMAGSDFIKTSTGKETVNATFPVAIVMLRAIRDFFWKTGNKIGFKPAGGIRSAKDSLAWLSLVKEELGDEWLKPELFRIGASTLLSDIERQIYHHVTGRYAAYHDLPMS

SEQ ID NO: 218 - protein, 1041 aa, Homo sapiens
MATPAGLERWVQDELHSVLGLSERHVAQFLIGTAQRCTSAEEFVQRLRDTDTLDLSGPARDFALRLWNKVPRKAVVEKPARAAEREARALLEKNRSYRLLEDSEESSEETVSRAGSSLQKKRKKRKHLRKKREEEEEEEASEKGKKKTGGSKQQTEKPESEDEWERTERERLQDLEERDAFAERVRQRDKDRTRNVLERSDKKAYEEAQKRLKMAEEDRKAMVPELRKKSRREYLAKREREKLEDLEAELADEEFLFGDVELSRHERQELKYKRRVRDLAREYRAAGEQEKLEATNRYHMPKETRGQPARAVDLVEEESGAPGEEQRRWEEARLGAASLKFGARDAASQEPKYQLVLEEEETIEFVRATQLQGDEEPSAPPTSTQAQQKESIQAVRRSLPVFPFREELLAAIANHQVLIIEGETGSGKTTQIPQYLFEEGYTNKGMKIACTQPRRVAAMSVAARVAREMGVKLGNEVGYSIRFEDCTSERTVLRYMTDGMLLREFLSEPDLASYSVVMVDEAHERTLHTDILFGLIKDVARFRPELKVLVASATMDTARFSTFFDDAPVFRIPGRRFPVDIFYTKAPEADYLEACVVSVLQIHVTQPPGDILVFLTGQEEIEAACEMLQDRCRRLGSKIRELLVLPIYANLPSDMQARIFQPTPPGARKVVVATNIAETSLTIEGIIYVLDPGFCKQKSYNPRTGMESLTVTPCSKASANQRAGRAGRVAAGKCFRLYTAWAYQHELEETTVPEIQRTSLGNVVLLLKSLGIHDLMHFDFLDPPPYETLLLALEQLYALGALNHLGELTTSGRKMAELPVDPMLSKMILASEKYSCSEEILTVAAMLSVNNSIFYRPKDKVVHADNARVNFFLPGGDHLVLLNVYTQWAESGYSSQWCYENFVQFRSMRRARDVREQLEGLLERVEVGLSSCQGDYIRVRKAITAGYFYHTARLTRSGYRTVKQQQTVFIHPNSSLFEQQPRWLLYHELVLTTKEFMRQVLEIESSWLLEVAPHYYKAKELEDPHAKKMPKKIGKTREELG

SEQ ID NO: 219 - protein, 1101 aa, Homo sapiens
MEQPGAAASGAGGGSEEPGGGRSNKRSAGNRAANEEETKNKPKLNIQIKTLADDVRDRITSFRKSTVKKEKPLIQHPIDSQVAMSEFPAAQPLYDERSLNLSEKEVLDLFEKMMEDMNLNEEKKAPLRNKDFTTKREMVVQYISATAKSGGLKNSKHECTLSSQEYVHELRSGISDEKLLNCLESLRVSLTSNPVSWVNNFGHEGLGLLLDELEKLLDKKQQENIDKKNQYKLIQCLKAFMNNKFGLQRILGDERSLLLLARAIDPKQPNMMTEIVKILSAICIVGEENILDKLLGAITTAAERNNRERFSPIVEGLENQEALQLQVACMQFINALVTSPYELDFRIHLRNEFLRSGLKTMLPDLKEKENDELDIQLKVFDENKEDDLTELSHRLNDIRAEMDDMNEVYHLLYNMLKDTAAENYFLSILQHFLLIRNDYYIRPQYYKIIEECVSQIVLHCSGMDPDFKYRQRLDIDLTHLIDSCVNKAKVEESEQKAAEFSKKFDEEFTARQEAQAELQKRDEKIKELEAEIQQLRTQAQVLSSSSGIPGPPAAPPLPGVGPPPPPPAPPLPGGAPLPPPPPPLPGMMGIPPPPPPPLLFGGPPPPPPLGGVPPPPGISLNLPYGMKQKKMYKPEVSMKRINWSKIEPTELSENCFWLRVKEDKFENPDLFAKLALNFATQIKVQKNAEALEEKKTGPTKKKVKELRILDPKTAQNLSIFLGSYRMPYEDIRNVILEVNEDMLSEALIQNLVKHLPEQKILNELAELKNEYDDLCEPEQFGVVMSSVKMLQPRLSSILFKLTFEEHINNIKPSIIAVTLACEELKKSESFNRLLELVLLVGNYMNSGSRNAQSLGFKINFLCKIRDTKSADQKTTLLHFIADICEEKYRDILKFPEELEHVESASKVSAQILKSNLASMEQQIVHLERDIKKFPQAENQHDKFVEKMTSFTKTAREQYEKLSTMHNNMMKLYENLGEYFIFDSKTVSIEEFFGDLNNFRTLFLEAVRENNKRREMEEKTRRAKLAKEKAEQEKLERQKKKKQLIDINKEGDETGVMDNLLEALQSGAAFRDRRKRIPRNPDNRRVPLERSRSRHNGAISSK

SEQ ID NO: 220 - protein, 453 aa, Homo sapiens
MLSRSRCVSRAFSRSLSAFQKGNCPLGRRSLPGVSLCQGPGYPNSRKVVINNSVFSVRFFRTTAVCKDDLVTVKTPAFAESVTEGDVRWEKAVGDTVAEDEVVCEIETDKTSVQVPSPANGVIEALLVPDGGKVEGGTPLFTLRKTGAAPAKAKPAEAPAAAAPKAEPTAAAVPPPAAPIPTQMPPVPSPSQPPSGKPVSAVKPTVAPPLAEPGAGKGLRSEHREKMNRMRQRIAQRLKEAQNTCAMLTTFNEIDMSNIQEMRARHKEAFLKKHNLKLGFMSAFVKASAFALQEQPVVNAVIDDTTKEVVYRDYIDISVAVATPRGLVVPVIRNVEAMNFADIERTITELGEKARKNELAIEDMDGGTFTISNGGVFGSLFGTPIINPPQSAILGMHGIFDRPVAIGGKVEVRPMMYVALTYDHRLIDGREAVTFLRKIKAAVEDPRVLLLDL

SEQ ID NO: 221 - protein, 407 aa, Homo sapiens
MSGGSADYNREHGGPEGMDPDGVIESNWNEIVDNFDDMNLKESLLRGIYAYGFEKPSAIQQRAIIPCIKGYDVIAQAQSGTGKTATFAISILQQLEIEFKETQALVLAPTRELAQQIQKVILALGDYMGATCHACIGGTNVRNEMQKLQAEAPHIVVGTPGRVFDMLNRRYLSPKWIKMFVLDEADEMLSRGFKDQIYEIFQKLNTSIQVVLLSATMPTDVLEVTKKFMRDPIRILVKKEELTLEGIKQFYINVEREEWKLDTLCDLYETLTITQAVIFLNTRRKVDWLTEKMHARDFTVSALHGDMDQKERDVIMREFRSGSSRVLITTDLLARGIDVQQVSLVINYDLPTNRENYIHRIGRGGRFGRKGVAINFVTEEDKRILRDIETFYNTTVEEMPMNVADLI

SEQ ID NO: 222 - protein, 245 aa, Homo sapiens
MNNKFDALKDDDSGDHDQNEENSTQKDGEKEKTERDKNQSSSKRKAVVPGPAEHPLQYNYTFWYSRRTPGRPTSSQSYEQNIKQIGTFASVEQFWRFYSHMVRPGDLTGHSDFHLFKEGIKPMWEDDANKNGGKWIIRLRKGLASRCWENLILAMLGEQFMVGEEICGAVVSVRFQEDIISIWNKTASDQATTARIRDTLRRVLNLPPNTIMEYKTHTDSIKMPGRLGPQRLLFQNLWKPRLNVP

SEQ ID NO: 223 - protein, 163 aa, Homo sapiens
MSLLLLVVSALHILILILLFVATLDKSWWTLPGKESLNLWYDCTWNNDTKTWACSNVSENGWLKAVQVLMVLSLILCCLSFILFMFQLYTMRRGGLFYATGLCQLCTSVAVFTGALIYAIHAEEILEKHPRGGSFGYCFALAWVAFPLALVSGIIYIHLRKRE

SEQ ID NO: 224 - protein, 434 aa, Homo sapiens
MSILKIHAREIFDSRGNPTVEVDLFTSKGLFRAAVPSGASTGIYEALELRDNDKTRYMGKGVSKAVEHINKTIAPALVSKKLNVTEQEKIDKLMIEMDGTENKSKFGANAILGVSLAVCKAGAVEKGVPLYRHIADLAGNSEVILPVPAFNVINGGSHAGNKLAMQEFMILPVGAANFREAMRIGAEVYHNLKNVIKEKYGKDATNVGDEGGFAPNILENKEGLELLKTAIGKAGYTDKVVIGMDVAASEFFRSGKYDLDFKSPDDPSRYISPDQLADLYKSFIKDYPVVSIEDPFDQDDWGAWQKFTASAGIQVVGDDLTVTNPKRIAKAVNEKSCNCLLLKVNQIGSVTESLQACKLAQANGWGVMVSHRSGETEDTFIADLVVGLCTGQIKTGAPCRSERLAKYNQLLRIEEELGSKAKFAGRNFRNPLAK

SEQ ID NO: 225 - protein, 522 aa, Homo sapiens
MRLRVRLLKRTWPLEVPETEPTLGHLRSHLRQSLLCTWGYSSNTRFTITLNYKDPLTGDEETLASYGIVSGDLICLILQDDIPAPNIPSSTDSEHSSLQNNEQPSLATSSNQTSMQDEQPSDSFQGQAAQSGVWNDDSMLGPSQNFEAESIQDNAHMAEGTGFYPSEPMLCSESVEGQVPHSLETLYQSADCSDANDALIVLIHLLMLESGYIPQGTEAKALSMPEKWKLSGVYKLQYMHPLCEGSSATLTCVPLGNLIVVNATLKINNEIRSVKRLQLLPESFICKEKLGENVANIYKDLQKLSRLFKDQLVYPLLAFTRQALNLPDVFGLVVLPLELKLRIFRLLDVRSVLSLSAVCRDLFTASNDPLLWRFLYLRDFRDNTVRVQDTDWKELYRKRHIQRKESPKGRFVMLLPSSTHTIPFYPNPLHPRPFPSSRLPPGIIGGEYDQRPTLPYVGDPISSLIPGPGETPSQFPPLRPRFDPVGPLPGPNPILPGRGGPNDRFPFRPSRGRPTDGRLSFM

SEQ ID NO: 226 - protein, 86 aa, Homo sapiens
MIPAVVLLLLLLVEQAAALGEPQLCYILDAILFLYGIVLTLLYCRLKIQVRKAAITSYEKSDGVYTGLSTRNQETYETLKHEKPPQ

SEQ ID NO: 227 - protein, 439 aa, Homo sapiens
MKLANWYWLSSAVLATYGFLVVANNETEEIKDERAKDVCPVRLESRGKCEEAGECPYQVSLPPLTIQLPKQFSRIEEVFKEVQNLKEIVNSLKKSCQDCKLQADDNGDPGRNGLLLPSTGAPGEVGDNRVRELESEVNKLSSELKNAKEEINVLHGRLEKLNLVNMNNIENYVDSKVANLTFVVNSLDGKCSKCPSQEQIQSRPVQHLIYKDCSDYYAIGKRSSETYRVTPDPKNSSFEVYCDMETMGGGWTVLQARLDGSTNFTRTWQDYKAGFGNLRREFWLGNDKIHLLTKSKEMILRIDLEDFNGVELYALYDQFYVANEFLKYRLHVGNYNGTAGDALRFNKHYNHDLKFFTTPDKDNDRYPSGNCGLYYSSGWWFDACLSANLNGKYYHQKYRGVRNGIFWGTWPGVSEAHPGGYKSSFKEAKMMIRPKHFKP

SEQ ID NO: 228 - protein, 526 aa, Homo sapiens
MVNEGPNQEESDDTPVPESALQADPSVSVHPSVSVHPSVSINPSVSVHPSSSAHPSALAQPSGLAHPSSSGPEDLSVIKVSRRRWAVVLVFSCYSMCNSFQWIQYGSINNIFMHFYGVSAFAIDWLSMCYMLTYIPLLLPVAWLLEKFGLRTIALTGSALNCLGAWVKLGSLKPHLFPVTVVGQLICSVAQVFILGMPSRIASVWFGANEVSTACSVAVFGNQLGIAIGFLVPPVLVPNIEDRDELAYHISIMFYIIGGVATLLLILVIIVFKEKPKYPPSRAQSLSYALTSPDASYLGSIARLFKNLNFVLLVITYGLNAGAFYALSTLLNRMVIWHYPGEEVNAGRIGLTIVIAGMLGAVISGIWLDRSKTYKETTLVVYIMTLVGMVVYTFTLNLGHLWVVFITAGTMGFFMTGYLPLGFEFAVELTYPESEGISSGLLNISAQVFGIIFTISQGQIIDNYGTKPGNIFLCVFLTLGAALTAFIKADLRRQKANKETLENKLQEEEEESNTSKVPTAVSEDHL

SEQ ID NO: 229 - protein, 175 aa, Homo sapiens
MSSQIRQNYSTDVEAAVNSLVNLYLQASYTYLSLGFYFDRDDVALEGVSHFFRELAEEKREGYERLLKMQNQRGGRALFQDIKKPAEDEWGKTPDAMKAAMALEKKLNQALLDLHALGSARTDPHLCDFLETHFLDEEVKLIKKMGDHLTNLHRLGGPEAGLGEYLFERLTLKHD

SEQ ID NO: 230 - protein, 794 aa, Homo sapiens
MELRPWLLWVVAATGTLVLLAADAQGQKVFTNTWAVRIPGGPAVANSVARKHGFLNLGQIFGDYYHFWHRGVTKRSLSPHRPRHSRLQREPQVQWLEQQVAKRRTKRDVYQEPTDPKFPQQWYLSGVTQRDLNVKAAWAQGYTGHGIVVSILDDGIEKNHPDLAGNYDPGASFDVNDQDPDPQPRYTQMNDNRHGTRCAGEVAAVANNGVCGVGVAYNARIGGVRMLDGEVTDAVEARSLGLNPNHIHIYSASWGPEDDGKTVDGPARLAEEAFFRGVSQGRGGLGSIFVWASGNGGREHDSCNCDGYTNSIYTLSISSATQFGNVPWYSEACSSTLATTYSSGNQNEKQIVTTDLRQKCTESHTGTSASAPLAAGIIALTLEANKNLTWRDMQHLVVQTSKPAHLNANDWATNGVGRKVSHSYGYGLLDAGAMVALAQNWTTVAPQRKCIIDILTEPKDIGKRLEVRKTVTACLGEPNHITRLEHAQARLTLSYNRRGDLAIHLVSPMGTRSTLLAARPHDYSADGFNDWAFMTTHSWDEDPSGEWVLEIENTSEANNYGTLTKFTLVLYGTAPEGLPVPPESSGCKTLTSSQACVVCEEGFSLHQKSCVQHCPPGFAPQVLDTHYSTENDVETIRASVCAPCHASCATCQGPALTDCLSCPSHASLDPVEQTCSRQSQSSRESPPQQQPPRLPPEVEAGQRLRAGLLPSHLPEVVAGLSCAFIVLVFVTVFLVLQLRSGFSFRGVKVYTMDRGLISYKGLPPEAWQEECPSDSEEDEGRGERTAFIKDQSAL

SEQ ID NO: 231 - protein, 412 aa, Homo sapiens
MTDLYYLSQTDGAGDWREKEAKDLTELVQRRITYLQNPKDCSKAKKLVCNINKGCGYGCQLHHVVYCFMIAYGTQRTLILESQNWRYATGGWETVFRPVSETCTDRSGISTGHWSGEVKDKNVQVVELPIVDSLHPRPPYLPLAVPEDLADRLVRVHGDPAVWWVSQFVKYLIRPQPWLEKEIEEATKKLGFKHPVIGVHVRRTDKVGTEAAFHPIEEYMVHVEEHFQLLARRMQVDKKRVYLATDDPSLLKEAKTKYPNYEFISDNSISWSAGLHNRYTENSLRGVILDIHFLSQADFLVCTFSSQVCRVAYEIMQTLHPDASANFHSLDDIYYFGGQNAHNQIAIYAHQPRTADEIPMEPGDIIGVAGNHWDGYSKGVNRKLGRTGLYPSYKVREKIETVKYPTYPEAEK

SEQ ID NO: 232 - protein, 621 aa, Homo sapiens
MAELTVEVRGSNGAFYKGFIKDVHEDSLTVVFENNWQPERQVPFNEVRLPPPPDIKKEISEGDEVEVYSRANDQEPCGWWLAKVRMMKGEFYVIEYAACDATYNEIVTFERLRPVNQNKTVKKNTFFKCTVDVPEDLREACANENAHKDFKKAVGACRIFYHPETTQLMILSASEATVKRVNILSDMHLRSIRTKLMLMSRNEEATKHLECTKQLAAAFHEEFVVREDLMGLAIGTHGSNIQQARKVPGVTAIELDEDTGTFRIYGESADAVKKARGFLEFVEDFIQVPRNLVGKVIGKNGKVIQEIVDKSGVVRVRIEGDNENKLPREDGMVPFVFVGTKESIGNVQVLLEYHIAYLKEVEQLRMERLQIDEQLRQIGSRSYSGRGRGRRGPNYTSGYGTNSELSNPSETESERKDELSDWSLAGEDDRDSRHQRDSRRRPGGRGRSVSGGRGRGGPRGGKSSISSVLKDPDSNPYSLLDNTESDQTADTDASESHHSTNRRRRSRRRRTDEDAVLMDGMTESDTASVNENGLVTVADYISRAESQSRQRNLPRETLAKNKKEMAKDVIEEHGPSEKAINGPTSASGDDISKLQRTPGEEKINTLKEENTQEAAVLNGVS

SEQ ID NO: 233 - protein, 335 aa, Homo sapiens
MGKVKVGVNGFGRIGRLVTRAAFNSGKVDIVAINDPFIDLNYMVYMFQYDSTHGKFHGTVKAENGKLVINGNPITIFQERDPSKIKWGDAGAEYVVESTGVFTTMEKAGAHLQGGAKRVIISAPSADAPMFVMGVNHEKYDNSLKIISNASCTTNCLAPLAKVIHDNFGIVEGLMTTVHAITATQKTVDGPSGKLWRDGRGALQNIIPASTGAAKAVGKVIPELNGKLTGMAFRVPTANVSVVDLTCRLEKPAKYDDIKKVVKQASEGPLKGILGYTEHQVVSSDFNSDTHSSTFDAGAGIALNDHFVKLISWYDNEFGYSNRVVDLMAHMASKE

SEQ ID NO: 234 - protein, 336 aa, Homo sapiens
MSNMENSFDDVSCLSPQNLGSSSPSKKQSKENTITINCVTFPHPDTMPEQQLLKPTEWSYCDYFWADKKDPQGNGTVAGFELLLQKQLKGKQMQKEMSEFIRERIKIEEDYAKNLAKLSQNSLASQEEGSLGEAWAQVKKSLADEAEVHLKFSAKLHSEVEKPLMNFRENFKKDMKKCDHHIADLRKQLASRYASVEKARKALTERQRDLEMKTQQLEIKLSNKTEEDIKKARRKSTQAGDDLMRCVDLYNQAQSKWFEEMVTTTLELERLEVERVEMIRQHLCQYTQLRHETDMFNQSTVEPVDQLLRKVDPAKDRELWVREHKTGNIRPVDMEI

SEQ ID NO: 235 - protein, 591 aa, Homo sapiens
MAPEINLPGPMSLIDNTKGQLVVNPEALKILSAITQPVVVVAIVGLYRTGKSYLMNKLAGKKNGFSLGSTVKSHTKGIWMWCVPHPKKPEHTLVLLDTEGLGDIEKGDNENDSWIFALAILLSSTFVYNSMGTINQQAMDQLHYVTELTDRIKANSSPGNNSVDDSADFVSFFPAFVWTLRDFTLELEVDGEPITADDYLELSLKLRKGTDKKSKSFNDPRLCIRKFFPKRKCFVFDWPAPKKYLAHLEQLKEEELNPDFIEQVAEFCSYILSHSNVKTLSGGIPVNGPRLESLVLTYVNAISSGDLPCMENAVLALAQIENSAAVEKAIAHYEQQMGQKVQLPTETLQELLDLHRDSEREAIEVFMKNSFKDVDQMFQRKLGAQLEARRDDFCKQNSKASSDCCMALLQDIFGPLEEDVKQGTFSKPGGYRLFTQKLQELKNKYYQVPRKGIQAKEVLKKYLESKEDVADALLQTDQSLSEKEKAIEVERIKAESAEAAKKMLEEIQKKNEEMMEQKEKSYQEHVKQLTEKMERDRAQLMAEQEKTLALKLQEQERLLKEGFENESKRLQKDIWDIQMRSKSLEPICNIL

SEQ ID NO: 236 - protein, 329 aa, Homo sapiens
MAAQYGSMSFNPSTPGASYGPGRQEPRNSQLRIVLVGKTGAGKSATGNSILGRKVFHSGTAAKSITKKCEKRSSSWKETELVVVDTPGIFDTEVPNAETSKEIIRCILLTSPGPHALLLVVPLGRYTEEEHKATEKILKMFGERARSFMILIFTRKDDLGDTNLHDYLREAPEDIQDLMDIFGDRYCALNNKATGAEQEAQRAQLLGLIQRVVRENKEGCYTNRMYQRAEEEIQKQTQAMQELHRVELEREKARIREEYEEKIRKLEDKVEQEKRKKQMEKKLAEQEAHYAVRQQRARTEVESKDGILELIMTALQIASFILLRLFAED

SEQ ID NO: 237 - protein, 298 aa, Homo sapiens
MAARRALHFVFKVGNRFQTARFYRDVLGMKVLRHEEFEEGCKAACNGPYDGKWSKTMVGFGPEDDHFVAELTYNYGVGDYKLGNDFMGITLASSQAVSNARKLEWPLTEVAEGVFETEAPGGYKFYLQNRSLPQSDPVLKVTLAVSDLQKSLNYWCNLLGMKIYEKDEEKQRALLGYADNQCKLELQGVKGGVDHAAAFGRIAFSCPQKELPDLEDLMKRENQKILTPLVSLDTPGKATVQVVILADPDGHEICFVGDEAFRELSKMDPEGSKLLDDAMAADKSDEWFAKHNKPKASG

SEQ ID NO: 238 - protein, 552 aa, Homo sapiens
MRLLPLAPGRLRRGSPRHLPSCSPALLLLVLGGCLGVFGVAAGTRRPNVVLLLTDDQDEVLGGMTPLKKTKALIGEMGMTFSSAYVPSALCCPSRASILTGKYPHNHHVVNNTLEGNCSSKSWQKIQEPNTFPAILRSMCGYQTFFAGKYLNEYGAPDAGGLEHVPLGWSYWYALEKNSKYYNYTLSINGKARKHGENYSVDYLTDVLANVSLDFLDYKSNFEPFFMMIATPAPHSPWTAAPQYQKAFQNVFAPRNKNFNIHGTNKHWLIRQAKTPMTNSSIQFLDNAFRKRWQTLLSVDDLVEKLVKRLEFTGELNNTYIFYTSDNGYHTGQFSLPIDKRQLYEFDIKVPLLVRGPGIKPNQTSKMLVANIDLGPTILDIAGYDLNKTQMDGMSLLPILRGASNLTWRSDVLVEYQGEGRNVTDPTCPSLSPGVSQCFPDCVCEDAYNNTYACVRTMSALWNLQYCEFDDQEVFVEVYNLTADPDQITNIAKTIDPELLGKMNYRLMMLQSCSGPTCRTPGVFDPGYRFDPRLMFSNRGSVRTRRFSKHLL

SEQ ID NO: 239 - protein, 330 aa, Homo sapiens
MEAVAKFDFTASGEDELSFHTGDVLKILSNQEEWFKAELGSQEGYVPKNFIDIQFPKWFHEGLSRHQAENLLMGKEVGFFIIRASQSSPGDFSISVRHEDDVQHFKVMRDNKGNYFLWTEKFPSLNKLVDYYRTNSISRQKQIFLRDRTREDQGHRGNSLDRRSQGGPHLSGAVGEEIRPSMNRKLSDHPPTLPLQQHQHQPQPPQYAPAPQQLQQPPQQRYLQHHHFHQERRGGSLDINDGHCGTGLGSEMNAALMHRRHTDPVQLQAAGRVRWARALYDFEALEDDELGFHSGEVVEVLDSSNPSWWTGRLHNKLGLFPANYVAPMTR

SEQ ID NO: 240 - protein, 241 aa, Homo sapiens
MSGESARSLGKGSAPPGPVPEGSIRIYSMRFCPFAERTRLVLKAKGIRHEVININLKNKPEWFFKKNPFGLVPVLENSQGQLIYESAITCEYLDEAYPGKKLLPDDPYEKACQKMILELFSKVPSLVGSFIRSQNKEDYAGLKEEFRKEFTKLEEVLTNKKTTFFGGNSISMIDYLIWPWFERLEAMKLNECVDHTPKLKLWMAAMKEDPTVSALLTSEKDWQGFLELYLQNSPEACDYGL

SEQ ID NO: 241 - protein, 189 aa, Homo sapiens
MLGMIKNSLFGSVETWPWQVLSKGDKEEVAYEERACEGGKFATVEVTDKPVDEALREAMPKVAKYAGGTNDKGIGMGMTVPISFAVFPNEDGSLQKKLKVWFRIPNQFQSDPPAPSDKSVKIEEREGITVYSMQFGGYAKEADYVAQATRLRAALEGTATYRGDIYFCTGYDPPMKPYGRRNEIWLLKT

SEQ ID NO: 242 - protein, 126 aa, Homo sapiens
MPEPVKSAPVPKKGSKKAINKAQKKDGKKRKRSRKESYSVYVYKVLKQVHPDTGISSKAMGIMNSFVNDIFERIAGEASRLAHYNKRSTITSREIQTAVRLLLPGELAKHAVSEGTKAVTKYTSSK

SEQ ID NO: 243 - protein, 136 aa, Homo sapiens
MARTKQTARKSTGGKAPRKQLATKAARKSAPATGGVKKPHRYRPGTVALREIRRYQKSTELLIRKLPFQRLVREIAQDFKTDLRFQSSAVMALQEACEAYLVGLFEDTNLCAIHAKRVTIMPKDIQLARRIRGERA

SEQ ID NO: 244 - protein, 103 aa, Homo sapiens [sequence omitted]

SEQ ID NO: 245 - protein, 260 aa, Homo sapiens
MRPEDRMFHIRAVILRALSLAFLLSLRGAGAIKADHVSTYAAFVQTHRPTGEFMFEFDEDEMFYVDLDKKETVWHLEEFGQAFSFEAQGGLANIAILNNNLNTLIQRSNHTQATNDPPEVTVFPKEPVELGQPNTLICHIDKFFPPVLNVTWLCNGELVTEGVAESLFLPRTDYSFHKFHYLTFVPSAEDFYDCRVEHWGLDQPLLKHWEAQEPIQMPETTETVLCALGLVLGLVGIIVGTVLIIKSLRSGHDPRAQGTL

SEQ ID NO: 246 - protein, 317 aa, Homo sapiens
MSHGPKQPGAAAAPAGGKAPGQHGGFVVTVKQERGEGPRAGEKGSHEEEPVKKRGWPKGKKRKKILPNGPKAPVTGYVRFLNERREQIRTRHPDLPFPEITKMLGAEWSKLQPTEKQRYLDEAEREKQQYMKELRAYQQSEAYKMCTEKIQEKKIKKEDSSSGLMNTLLNGHKGGDCDGFSTFDVPIFTEEFLDQNKAREAELRRLRKMNVAFEEQNAVLQRHTQSMSSARERLEQELALEERRTLALQQQLQAVRQALTASFASLPVPGTGETPTLGTLDFYMARLHGAIERDPAQHEKLIVRIKEILAQVASEHL

SEQ ID NO: 247 - protein, 90 aa, Homo sapiens
MPKRKAKGDAKGDKAKVKDEPQRRSARLSAKPAPPKPEPRPKKASAKKGEKLPKGRKGKADAGKDGNNPAKNRDASTLQSQKAEGTGDAK

SEQ ID NO: 248 - protein, 224 aa, Homo sapiens
MSSYFVNSTFPVTLASGQESFLGQLPLYSSGYADPLRHYPAPYGPGPGQDKGFATSSYYPPAGGGYGRAAPCDYGPAPAFYREKESACALSGADEQPPFHPEPRKSDCAQDKSVFGETEEQKCSTPVYPWMQRMNSCNSSSFGPSGRRGRQTYTRYQTLELEKEFHYNRYLTRRRRIEIAHALCLTERQIKIWFQNRRMKWKKESKLLSASQLSAEEEEEKQAE

SEQ ID NO: 249 - protein, 840 aa, Homo sapiens
MSVVGIDLGFQSCYVAVARAGGIETIANEYSDRCTPACISFGPKNRSIGAAAKSQVISNAKNTVQGFKRFHGRAFSDPFVEAEKSNLAYDIVQLPTGLTGIKVTYMEEERNFTTEQVTAMLLSKLKETAESVLKKPVVDCVVSVPCFYTDAERRSVMDATQIAGLNCLRLMNETTAVALAYGIYKQDLPALEEKPRNVVFVDMGHSAYQVSVCAFNRGKLKVLATAFDTTLGGRKFDEVLVNHFCEEFGKKYKLDIKSKIRALLRLSQECEKLKKLMSANASDLPLSIECFMNDVDVSGTMNRGKFLEMCNDLLARVEPPLRSVLEQTKLKKEDIYAVEIVGGATRIPAVKEKISKFFGKELSTTLNADEAVTRGCALQCAILSPAFKVREFSITDVVPYPISLRWNSPAEEGSSDCEVFSKNHAAPFSKVLTFYRKEPFTLEAYYSSPQDLPYPDPAIAQFSVQKVTPQSDGSSSKVKVKVRVNVHGIFSVSSASLVEVHKSEENEEPMETDQNAKEEEKMQVDQEEPHVEEQQQQTPAENKAESEEMETSQAGSKDKKMDQPPQAKKAKVKTSTVDLPIENQLLWQIDREMLNLYIENEGKMIMQDKLEKERNDAKNAVEEYVYEMRDKLSGEYEKFVSEDDRNSFTLKLEDTENWLYEDGEDQPKQVYVDKLAELKNLGQPIKIRFQESEERPKLFEELGKQIQQYMKIISSFKNKEDQYDHLDAADMTKVEKSTNEAMEWMNNKLNLQNKQSLTMDPVVKSKEIEAKIKELTSTCSPIISKPKPKVEPPKEEQKNAEQNGPVDGQGDNPGPQAAEQGTDTAVPSDSDKKLPEMDID

SEQ ID NO: 250 - protein, 119 aa, Homo sapiens
MKALSPVRGCYEAVCCLSERSLAIARGRGKGPAAEEPLSLLDDMNHCYSRLRELVPGVPRGTQLSQVEILQRVIDYILDLQVVLAEPAPGPPDGPHLPIQTAELTPELVISNDKRSFCH

SEQ ID NO: 251 - protein, 478 aa, Homo sapiens
MSTNGDDHQVKDSLEQLRCHFTWELSIDDDEMPDLENRVLDQIEFLDTKYSVGIHNLLAYVKHLKGQNEEALKSLKEAENLMQEEHDNQANVRSLVTWGNFAWMYYHMGRLAEAQTYLDKVENICKKLSNPFRYRMECPEIDCEEGWALLKCGGKNYERAKACFEKVLEVDPENPESSAGYAISAYRLDGFKLATKNHKPFSLLPLRQAVRLNPDNGYIKVLLALKLQDEGQEAEGEKYIEEALANMSSQTYVFRYAAKFYRRKGSVDKALELLKKALQETPTSVLLHHQIGLCYKAQMIQIKEATKGQPRGQNREKLDKMIRSAIFHFESAVEKKPTFEVAHLDLARMYIEAGNHRKAEENFQKLLCMKPVVEETMQDIHFHYGRFQEFQKKSDVNAIIHYLKAIKIEQASLTRDKSINSLKKLVLRKLRRKALDLESLSLLGFVYKLEGNMNEALEYYERALRLAADFENSVRQGP

SEQ ID NO: 252 - protein, 337 aa, Homo sapiens
MRPTLLWSLLLLLGVFAAAAAAPPDPLSQLPAPQHPKIRLYNAEQVLSWEPVALSNSTRPVVYQVQFKYTDSKWFTADIMSIGVNCTQITATECDFTAASPSAGFPMDFNVTLRLRAELGALHSAWVTMPWFQHYRNVTVGPPENIEVTPGEGSLIIRFSSPFDIADTSTAFFCYYVHYWEKGGIQQVKGPFRSNSISLDNLKPSRVYCLQVQAQLLWNKSNIFRVGHLSNISCYETMADASTELQQVILISVGTFSLLSVLAGACFFLVLKYRGLIKYWFHTPPSIPLQIEEYLKDPTQPILEALDKDSSPKDDVWDSVSIISFPEKEQEDVLQTL

SEQ ID NO: 253 - protein, 459 aa, Homo sapiens
MTILGTTFGMVFSLLQVVSGESGYAQNGDLEDAELDDYSFSCYSQLEVNGSQHSLTCAFEDPDVNITNLEFEICGALVEVKCLNFRKLQEIYFIETKKFLLIGKSNICVKVGEKSLTCKKIDLTTIVKPEAPFDLSVVYREGANDFVVTFNTSHLQKKYVKVLMHDVAYRQEKDENKWTHVNLSSTKLTLLQRKLQPAAMYEIKVRSIPDHYFKGFWSEWSPSYYFRTPEINNSSGEMDPILLTISILSFFSVALLVILACVLWKKRIKPIVWPSLPDHKKTLEHLCKKPRKNLNVSFNPESFLDCQIHRVDDIQARDEVEGFLQDTFPQQLEESEKQRLGGDVQSPNCPSEDVVITPESFGRDSSLTCLAGNVSACDAPILSSSRSLDCRESGKNGPHVYQDLLLSLGTTNSTLPPPFSLQSGILTLNPVAQGQPILTSLGSNQEEAYVTMSSFYQNQ

SEQ ID NO: 254 - protein, 184 aa, Homo sapiens
MVRKLKFHEQKLLKQVDFLNWEVTDHNLHELRVLRRYRLQRREDYTRYNQLSRAVRELARRLRDLPERDQFRVRASAALLDKLYALGLVPTRGSLELCDFVTASSFCRRRLPTVLLKLRMAQHLQAAVAFVEQGHVRVGPDVVTDPAFLVTRSMEDFVTWVDSSKIKRHVLEYNEERDDFDLEA

SEQ ID NO: 255 - protein, 599 aa, Homo sapiens
MEGPLTPPPLQGGGAAAVPEPGARQHPGHETAAQRYSARLLQAGYEPESPRLDLATHPTTPRSELSSVVLLAGVGVQMDRLRRASMADYLISGGTGYVPEDGLTAQQLFASADGLTYNDFLILPGFIDFIADEVDLTSALTRKITLKTPLISSPMDTVTEADMAIAMALMGGIGFIHHNCTPEFQANEVRKVKKFEQGFITDPVVLSPSHTVGDVLEAKMRHGFSGIPITETGTMGSKLVGIVTSRDIDFLAEKDHTTLLSEVMTPRIELVVAPAGVTLKEANEILQRSKKGKLPIVNDCDELVAIIARTDLKKNRDYPLASKDSQKQLLCGAAVGTREDDKYRLDLLTQAGVDVIVLDSSQGNSVYQIAMVHYIKQKYPHLQVIGGNVVTAAQAKNLIDAGVDGLRVGMGCGSICITQEVMACGRPQGTAVYKVAEYARRFGVPIIADGGIQTVGHVVKALALGASTVMMGSLLAATTEAPGEYFFSDGVRLKKYRGMGSLDAMEKSSSSQKRYFSEGDKVKIAQGVSGSIQDKGSIQKFVPYLIAGIQHGCQDIGARSLSVLRSMMYSGELKFEKRTMSAQIEGGVHGLHSYEKRLY

SEQ ID NO: 256 - protein, 399 aa, Homo sapiens
MSDILRELLCVSEKAANIARACRQQEALFQLLIEEKKEGEKNKKFAVDFKTLADVLVQEVIKQNMENKFPGLEKNIFGEESNEFTNDWGEKITLRLCSTEEETAELLSKVLNGNKVASEALARVVHQDVAFTDPTLDSTEINVPQDILGIWVDPIDSTYQYIKGSADIKSNQGIFPCGLQCVTILIGVYDIQTGVPLMGVINQPFVSRDPNTLRWKGQCYWGLSYMGTNMHSLQLTISRRNGSETHTGNTGSEAAFSPSFSAVISTSEKETIKAALSRVCGDRIFGAAGAGYKSLCVVQGLVDIYIFSEDTTFKWDSCAAHAILRAMGGGIVDLKECLERNPETGLDLPQLVYHVENEGAAGVDRWANKGGLIAYRSRKRLETFLSLLVQNLAPAETHT

SEQ ID NO: 257 - protein, 181 aa, Homo sapiens
MAGSREVVAMDCEMVGLGPHRESGLARCSLVNVHGAVLYDKFIRPEGEITDYRTRVSGVTPQHMVGATPFAVARLEILQLLKGKLVVGHDLKHDFQALKEDMSGYTIYDTSTDRLLWREAKLDHCRRVSLRVLSERLLHKSIQNSLLGHSSVEDARATMELYQISQRIRARRGLPRLAVSD

SEQ ID NO: 258 - protein, 1163 aa, Homo sapiens
MTRTRAALLLFTALATSLGFNLDTEELTAFRVDSAGFGDSVVQYANSWVVVGAPQKITAANQTGGLYQCGYSTGACEPIGLQVPPEAVNMSLGLSLASTTSPSQLLACGPTVHHECGRNMYLTGLCFLLGPTQLTQRLPVSRQECPRQEQDIVFLIDGSGSISSRNFATMMNFVRAVISQFQRPSTQFSLMQFSNKFQTHFTFEEFRRSSNPLSLLASVHQLQGFTYTATAIQNVVHRLFHASYGARRDAAKILIVITDGKKEGDSLDYKDVIPMADAAGIIRYAIGVGLAFQNRNSWKELNDIASKPSQEHIFKVEDFDALKDIQNQLKEKIFAIEGTETTSSSSFELEMAQEGFSAVFTPDGPVLGAVGSFTWSGGAFLYPPNMSPTFINMSQENVDMRDSYLGYSTELALWKGVQSLVLGAPRYQHTGKAVIFTQVSRQWRMKAEVTGTQIGSYFGASLCSVDVDSDGSTDLVLIGAPHYYEQTRGGQVSVCPLPRGWRRWWCDAVLYGEQGHPWGRFGAALTVLGDVNGDKLTDVVIGAPGEEENRGAVYLFHGVLGPSISPSHSQRIAGSQLSSRLQYFGQALSGGQDLTQDGLVDLAVGARGQVLLLRTRPVLWVGVSMQFIPAEIPRSAFECREQVVSEQTLVQSNICLYIDKRSKNLLGSRDLQSSVTLDLALDPGRLSPRATFQETKNRSLSRVRVLGLKAHCENFNLLLPSCVEDSVTPITLRLNFTLVGKPLLAFRNLRPMLAADAQRYFTASLPFEKNCGADHICQDNLGISFSFPGLKSLLVGSNLELNAEVMVWNDGEDSYGTTITFSHPAGLSYRYVAEGQKQGQLRSLHLTCDSAPVGSQGTWSTSCRINHLIFRGGAQITFLATFDVSPKAVLGDRLLLTANVSSENNTPRTSKTTFQLELPVKYAVYTVVSSHEQFTKYLNFSESEEKESHVAMHRYQVNNLGQRDLPVSINFWVPVELNQEAVWMDVEVSHPQNPSLRCSSEKIAPPASDFLAHIQKNPVLDCSIAGCLRFRCDVPSFSVQEELDFTLKGNLSFGWVRQILQKKVSVVSVAEITFDTSVYSQLPGQEAFMRAQTTTVLEKYKVHNPTPLIVGSSIGGLLLLALITAVLYKVGFFKRQYKEMMEEANGQIAPENGTQTPSPPSEK

SEQ ID NO: 259 - protein, 798 aa, Homo sapiens
MNLQPIFWIGLISSVCCVFAQTDENRCLKANAKSCGECIQAGPNCGWCTNSTFLQEGMPTSARCDDLEALKKKGCPPDDIENPRGSKDIKKNKNVTNRSKGTAEKLKPEDITQIQPQQLVLRLRSGEPQTFTLKFKRAEDYPIDLYYLMDLSYSMKDDLENVKSLGTDLMNEMRRITSDFRIGFGSFVEKTVMPYISTTPAKLRNPCTSEQNCTSPFSYKNVLSLTNKGEVFNELVGKQRISGNLDSPEGGFDAIMQVAVCGSLIGWRNVTRLLVFSTDAGFHFAGDGKLGGIVLPNDGQCHLENNMYTMSHYYDYPSIAHLVQKLSENNIQTIFAVTEEFQPVYKELKNLIPKSAVGTLSANSSNVIQLIIDAYNSLSSEVILENGKLSEGVTISYKSYCKNGVNGTGENGRKCSNISIGDEVQFEISITSNKCPKKDSDSFKIRPLGFTEEVEVILQYICECECQSEGIPESPKCHEGNGTFECGACRCNEGRVGRHCECSTDEVNSEDMDAYCRKENSSEICSNNGECVCGQCVCRKRDNTNEIYSGKFCECDNFNCDRSNGLICGGNGVCKCRVCECNPNYTGSACDCSLDTSTCEASNGQICNGRGICECGVCKCTDPKFQGQTCEMCQTCLGVCAEHKECVQCRAFNKGEKKDTCTQECSYFNITKVESRDKLPQPVQPDPVSHCKEKDVDDCWFYFTYSVNGNNEVMVHVVENPECPTGPDIIPIVAGVVAGIVLIGLALLLIWKLLMIIHDRREFAKFEKEKMNAKWDTGENPIYKSAVTTVVNPKYEGK

SEQ ID NO: 260 - protein, 491 aa, Homo sapiens
MSLLMISENVKLAREYALLGNYDSAMVYYQGVLDQMNKYLYSVKDTYLQQKWQQVWQEINVEAKHVKDIMKTLESFKLDSTPLKAAQHDLPASEGEVWSMPVPVERRPSPGPRKRQSSQYSDPKSHGNRPSTTVRVHRSSAQNVHNDRGKAVRCREKKEQNKGREEKNKSPAAVTEPETNKFDSTGYDKDLVEALERDIISQNPNVRWDDIADLVEAKKLLKEAVVLPMWMPEFFKGIRRPWKGVLMVGPPGTGKTLLAKAVATECKTTFFNVSSSTLTSKYRGESEKLVRLLFEMARFYSPATIFIDEIDSICSRRGTSEEHEASRRVKAELLVQMDGVGGTSENDDPSKMVMVLAATNFPWDIDEALRRRLEKRIYIPLPSAKGREELLRISLRELELADDVDLASIAENMEGYSGADITNVCRDASLMAMRRRIEGLTPEEIRNLSKEEMHMPTTMEDFEMALKKVSKSVSAADIERYEKWIFEFGSC

SEQ ID NO: 261 - protein, 355 aa, Homo sapiens
MALSEPILPSFSTFASPCRERGLQERWPRAEPESGGTDDDLNSVLDFILSMGLDGLGAEAAPEPPPPPPPPAFYYPEPGAPPPYSAPAGGLVSELLRPELDAPLGPALHGRFLLAPPGRLVKAEPPEADGGGGYGCAPGLTRGPRGLKREGAPGPAASCMRGPGGRPPPPPDTPPLSPDGPARLPAPGPRASFPPPFGGPGFGAPGPGLHYAPPAPPAFGLFDDAAAAAAALGLAPPAARGLLTPPASPLELLEAKPKRGRRSWPRKRTATHTCSYAGCGKTYTKSSHLKAHLRTHTGEKPYHCNWDGCGWKFARSDELTRHYRKHTGHRPFQCHLCDRAFSRSDHLALHMKRHM

SEQ ID NO: 262 - protein, 231 aa, Homo sapiens
MQDEERYMTLNVQSKKRSSAQTSQLTFKDYSVTLHWYKILLGISGTVNGILTLTLISLILLVSQGVLLKCQKGSCSNATQYEDTGDLKVNNGTRRNISNKDLCASRSADQTVLCQSEWLKYQGKCYWFSNEMKSWSDSYVYCLERKSHLLIIHDQLEMAFIQKNLRQLNYVWIGLNFTSLKMTWTWVDGSPIDSKIFFIKGPAKENSCAAIKESKIFSETCSSVFKWICQY

SEQ ID NO: 263 - protein, 417 aa, Homo sapiens
MAAPGSARRPLLLLLLLLLLGLMHCASAAMFMVKNGNGTACIMANFSAAFSVNYDTKSGPKNMTFDLPSDATVVLNRSSCGKENTSDPSLVIAFGRGHTLTLNFTRNATRYSVQLMSFVYNLSDTHLFPNASSKEIKTVESITDIRADIDKKYRCVSGTQVHMNNVTVTLHDATIQAYLSNSSFSRGETRCEQDRPSPTTAPPAPPSPSPSPVPKSPSVDKYNVSGTNGTCLLASMGLQLNLTYERKDNTTVTRLLNINPNKTSASGSCGAHLVTLELHSEGTTVLLFQFGMNASSSRFFLQGIQLNTILPDARDPAFKAANGSLRALQATVGNSYKCNAEEHVRVTKAFSVNIFKVWVQAFKVEGGQFGSVEECLLDENSMLIPIAVGGALAGLVLIVLIAYLVGRKRSHAGYQTI

SEQ ID NO: 264 - protein, 250 aa, Homo sapiens
MTPGRCCLAADIQVETFIFTDGEDEALARHTGNVVITNCSAAHSRQALSCKMAVEYDRFIESGRKWFCHVDDDNYVNLRALLRLLASYPHTRDVYVGKPSLDRPIQAMERVSENKVRPVHFWFATGGAGFCISRGLALKMSPWASGGHFMNTAERIRLPDDCTIGYIVEALLGVPLIRSGLFHSHLENLQQVPTSELHEQVTLSYGMFENKRNAVHVKGPFSVEADPSRFRSIHCHLYPDTPWCPRTAIF

SEQ ID NO: 265 - protein, 228 aa, Homo sapiens
MCHVIVTCRSMLWTLLSIVVAFAELIAFMSADWLIGKARSRGGVEPAGPGGGSPEPYHPTLGIYARCIRNPGVQHFQRDTLCGPYAESFGEIASGFWQATAIFLAVGIFILCMVALVSVFTMCVQSIMKKSIFNVCGLLQGIAGLFLILGLILYPAGWGCQKAIDYCGHYASAYKPGDCSLGWAFYTAIGGTVLTFICAVFSAQAEIATSSDKVQEEIEEGKNLICLL

SEQ ID NO: 266 - protein, 632 aa, Homo sapiens
MTPALTALLCLGLSLGPRTRVQAGPFPKPTLWAEPGSVISWGSPVTIWCQGSLEAQEYQLDKEGSPEPLDRNNPLEPKNKARFSIPSMTQHHAGRYRCHYYSSAGWSEPSDPLELVMTGFYNKPTLSALPSPVVASGGNMTLRCGSQKGYHHFVLMKEGEHQLPRTLDSQQLHSGGFQALFPVGPVTPSHRWRFTCYYYYTNTPRVWSHPSDPLEILPSGVSRKPSLLTLQGPVLAPGQSLTLQCGSDVGYDRFVLYKEGERDFLQRPGQQPQAGLSQANFTLGPVSPSHGGQYRCYGAHNLSSEWSAPSDPLNILMAGQIYDTVSLSAQPGPTVASGENVTLLCQSRGYFDTFLLTKEGAAHPPLRLRSMYGAHKYQAEFPMSPVTSAHAGTYRCYGSYSSNPHLLSFPSEPLELMVSGHSGGSSLPPTGPPSTPGLGRYLEVLIGVSVAFVLLLFLLLFLLLRRQRHSKHRTSDQRKTDFQRPAGAAETEPKDRGLLRRSSPAADVQEENLYAAVKDTQSEDRVELDSQQSPHDEDPQAVTYAPVKHSSPRREMASPPSSLSGEFLDTKDRQVEEDRQMDTEAAASEASQDVTYAQLHSLTLRRKATEPPPSQEGEPPAEPSIYATLAIH

SEQ ID NO: 267 - protein, 611 aa, Homo sapiens
MPEIVDTCSLASPASVCRTKHLHLRCSVDFTRRTLTGTAALTVQSQEDNLRSLVLDTKDLTIEKVVINGQEVKYALGERQSYKGSPMEISLPIALSKNQEIVIEISFETSPKSSALQWLTPEQTSGKEHPYLFSQCQAIHCRAILPCQDTPSVKLTYTAEVSVPKELVALMSAIRDGETPDPEDPSRKIYKFIQKVPIPCYLIALVVGALESRQIGPRTLVWSEKEQVEKSAYEFSETESMLKIAEDLGGPYVWGQYDLLVLPPSFPYGGMENPCLTFVTPTLLAGDKSLSNVIAHEISHSWTGNLVTNKTWDHFWLNEGHTVYLERHICGRLFGEKFRHFNALGGWGELQNSVKTFGETHPFTKLVVDLTDIDPDVAYSSVPYEKGFALLFYLEQLLGGPEIFLGFLKAYVEKFSYKSITTDDWKDFLYSYFKDKVDVLNQVDWNAWLYSPGLPPIKPNYDMTLTNACIALSQRWITAKEDDLNSFNATDLKDLSSHQLNEFLAQTLQRAPLPLGHIKRMQEVYNFNAINNSEIRFRWLRLCIQSKWEDAIPLALKMATEQGRMKFTRPLFKDLAAFDKSHDQAVRTYQEHKASMHPVTAMLVGKDLKVD

SEQ ID NO: 268 - protein, 710 aa, Homo sapiens
MKLVFLVLLFLGALGLCLAGRRRSVQWCAVSQPEATKCFQWQRNMRKVRGPPVSCIKRDSPIQCIQAIAENRADAVTLDGGFIYEAGLAPYKLRPVAAEVYGTERQPRTHYYAVAVVKKGGSFQLNELQGLKSCHTGLRRTAGWNVPIGTLRPFLNWTGPPEPIEAAVARFFSASCVPGADKGQFPNLCRLCAGTGENKCAFSSQEPYFSYSGAFKCLRDGAGDVAFIRESTVFEDLSDEAERDEYELLCPDNTRKPVDKFKDCHLARVPSHAVVARSVNGKEDAIWNLLRQAQEKFGKDKSPKFQLFGSPSGQKDLLFKDSAIGFSRVPPRIDSGLYLGSGYFTAIQNLRKSEEEVAARRARVVWCAVGEQELRKCNQWSGLSEGSVTCSSASTTEDCIALVLKGEADAMSLDGGYVYTAGKCGLVPVLAENYKSQQSSDPDPNCVDRPVEGYLAVAVVRRSDTSLTWNSVKGKKSCHTAVDRTAGWNIPMGLLFNQTGSCKFDEYFSQSCAPGSDPRSNLCALCIGDEQGENKCVPNSNERYYGYTGAFRCLAENAGDVAFVKDVTVLQNTDGNNNEAWAKDLKLADFALLCLDGKRKPVTEARSCHLAMAPNHAVVSRMDKVERLKQVLLHQQAKFGRNGSDCPDKFCLFQSETKNLLFNDNTECLARLHGKTTYEKYLGPQYVAGITNLKKCSTSPLLEACEFLRK

SEQ ID NO: 269 - protein, 820 aa, Homo sapiens
MALLRDVSLQDPRDRFELLQRVGAGTYGDVYKARDTVTSELAAVKIVKLDPGDDISSLQQEITILRECRHPNVVAYIGSYLRNDRLWICMEFCGGGSLQEIYHATGPLEERQIAYVCREALKGLHHLHSQGKIHRDIKGANLLLTLQGDVKLADFGVSGELTASVAKRRSFIGTPYWMAPEVAAVERKGGYNELCDVWALGITAIELGELQPPLFHLHPMRALMLMSKSSFQPPKLRDKTRWTQNFHHFLKLALTKNPKKRPTAEKLLQHPFTTQQLPRALLTQLLDKASDPHLGTPSPEDCELETYDMFPDTIHSRGQHGPAERTPSEIQFHQVKFGAPRRKETDPLNEPWEEEWTLLGKEELSGSLLQSVQEALEERSLTIRSASEFQELDSPDDTMGTIKRAPFLGPLPTDPPAEEPLSSPPGTLPPPPSGPNSSPLLPTAWATMKQREDPERSSCHGLPPTPKVHMGACFSKVFNGCPLRIHAAVTWIHPVTRDQFLVVGAEEGIYTLNLHELHEDTLEKLISHRCSWLYCVNNVLLSLSGKSTHIWAHDLPGLFEQRRLQQQVPLSIPTNRLTQRIIPRRFALSTKIPDTKGCLQCRVVRNPYTGATFLLAALPTSLLLLQWYEPLQKFLLLKNFSSPLPSPAGMLEPLVLDGKELPQVCVGAEGPEGPGCRVLFHVLPLEAGLTPDILIPPEGIPGSAQQVIQVDRDTILVSFERCVRIVNMQGEPTATLAPELTFDFPIETVVCLQDSVLAFWSHGMQGRSLDTNEVTQEITDETRIFRVLGAHRDIILESIPTDNPEAHSNLYILTGHQSTY

SEQ ID NO: 270 - protein, 360 aa, Homo sapiens
MSQERPTFYRQELNKTIWEVPERYQNLSPVGSGAYGSVCAAFDTKTGLRVAVKKLSRPFQSIIHAKRTYRELRLLKHMKHENVIGLLDVFTPARSLEEFNDVYLVTHLMGADLNNIVKCQKLTDDHVQFLIYQILRGLKYIHSADIIHRDLKPSNLAVNEDCELKILDFGLARHTDDEMTGYVATRWYRAPEIMLNWMHYNQTVDIWSVGCIMAELLTGRTLFPGTDHINQLQQIMRLTGTPPAYLINRMPSHEARNYIQSLTQMPKMNFANVFIGANPLAVDLLEKMLVLDSDKRITAAQALAHAYFAQYHDPDDEPVADPYDQSFESRDLLIDEWKSLTYDEVISFVPPPLDQEEMES

SEQ ID NO: 271 - protein, 1336 aa, Homo sapiens
MMEIQMDEGGGVVVYQDDYCSGSVMSERVSGLAGSIYREFERLIHCYDEEVVKELMPLVVNVLENLDSVLSENQEHEVELELLREDNEQLLTQYEREKALRRQAEEKFIEFEDALEQEKKELQIQVEHYEFQTRQLELKAKNYADQISRLEERESEMKKEYNALHQRHTEMIQTYVEHIERSKMQQVGGNSQTESSLPGRRKERPTSLNVFPLADGTVRAQIGGKLVPAGDHWHLSDLGQLQSSSSYQCPQDEMSESGQSSAAATPSTTGTKSNTPTSSVPSAAVTPLNESLQPLGDYGVGSKNSKRAREKRDSRNMEVQVTQEMRNVSIGMGSSDEWSDVQDIIDSTPELDMCPETRLDRTGSSPTQGIVNKAFGINTDSLYHELSTAGSEVIGDVDEGADLLGEFSVRDDFFGMGKEVGNLLLENSQLLETKNALNVVKNDLIAKVDQLSGEQEVLRGELEAAKQAKVKLENRIKELEEELKRVKSEAIIARREPKEEAEDVSSYLCTESDKIPMAQRRRFTRVEMARVLMERNQYKERLMELQEAVRWTEMIRASREHPSVQEKKKSTIWQFFSRLFSSSSSPPPAKRPYPSVNIHYKSPTTAGFSQRRNHAMCPISAGSRPLEFFPDDDCTSSARREQKREQYRQVREHVRNDDGRLQACGWSLPAKYKQLSPNGGQEDTRMKNVPVPVYCRPLVEKDPTMKLWCAAGVNLSGWRPNEDDAGNGVKPAPGRDPLTCDREGDGEPKSAHTSPEKKKAKELPEMDATSSRVWILTSTLTTSKVVIIDANQPGTVVDQFTVCNAHVLCISSIPAASDSDYPPGEMFLDSDVNPEDPGADGVLAGITLVGCATRCNVPRSNCSSRGDTPVLDKGQGEVATIANGKVNPSQSTEEATEATEVPDPGPSEPETATLRPGPLTEHVFTDPAPTPSSGPQPGSENGPEPDSSSTRPEPEPSGDPTGAGSSAAPTMWLGAQNGWLYVHSAVANWKKCLHSIKLKDSVLSLVHVKGRVLVALADGTLAIFHRGEDGQWDLSNYHLMDLGHPHHSIRCMAVVYDRVWCGYKNKVHVIQPKTMQIEKSFDAHPRRESQVRQLAWIGDGVWVSIRLDSTLRLYHAHTHQHLQDVDIEPYVSKMLGTGKLGFSFVRITALLVAGSRLWVGTGNGVVISIPLTETVVLHRGQLLGLRANKTSPTSGEGARPGGIIHVYGDDSSDRAASSFIPYCSMAQAQLCFHGHRDAVKFFVSVPGNVLATLNGSVLDSPAEGPGPAAPASEVEGQKLRNVLVLSGGEGYIDFRIGDGEDDETEEGAGDMSQVKPVLSKAERSHIIVWQVSYTPE

SEQ ID NO: 272 - protein, 999 aa, Homo sapiens
MEPRAAAAGEPEPPAASSSFQARLWKNLQLGVGRSKGGGGGRAGGPERRTADTPSPSPPPPVGTGNAPARGSGAGSRWSGFKKRKQVLDRVFSSSQPNLCCSSPEPLEPGGAGRAEQGSTLRRRIREHLLPAVKGPAAASGAAGGTPPGGRSPDSAPSSSSASSSLSSSPQPPPRGDRARDEGARRQGPGAHLCHQKSSSLPGTACLEQLLEPPPPPAEPARSPAESRAPETGEEHGSSQKIINTAGTSNAEVPLADPGMYQLDITLRRGQSLAARDRGGTSDPYVKFKIGGKEVFRSKIIHKNLNPVWEEKACILVDHLREPLYIKVFDYDFGLQDDFMGSAFLDLTQLELNRPTDVTLTLKDPHYPDHDLGIILLSVILTPKEGESRDVTMLMRKSWKRSSKELSENEVVGSYFSVKSLFWRTCGRPALPVLGFCRAELQNPYCKNVQFQTQSLRLSDLHRKSHLWRGIVSITLIEGRDLKAMDSNGLSDPYVKFRLGHQKYKSKIMPKTLNPQWREQFDFHLYEERGGVIDITAWDKDAGKRDDFIGRCQVDLSALSREQTHKLELQLEEGEGHLVLLVTLTASATVSISDLSVNSLEDQKEREEILKRYSPLRIFHNLKDVGFLQVKVIRAEGLMAADVTGKSDPFCVVELNNDRLLTHTVYKNLNPEWNKVFTFNIKDIHSVLEVTVYDEDRDRSADFLGKVAIPLLSIQNGEQKAYVLKNKQLTGPTKGVIYLEIDVIFNAVKASLRTLIPKEQKYIEEENRLSKQLLLRNFIRMKRCVMVLVNAAYYVNSCFDWDSPPRSLAAFVLFLFVVWNFELYMIPLVLLLLLTWNYFLIISGKDNRQRDTVVEDMLEDEEEEDDKDDKDSEKKGFINKIYAIQEVCVSVQNILDEVASFGERIKNTFNWTVPFLSWLAIVALCVFTAILYCIPLRYIVLVWGINKFTKKLRSPYAIDNNELLDFLSRVPSDVQVVQYQELKPDPSHSPYKRKKNNLG

SEQ ID NO: 273 - protein, 602 aa, Homo sapiens
MNGGAERAMRSLPSLGGLALLCCAAAAAAAAVASAASAGNVTGGGGAAGQVDASPGPGLRGEPSHPFPRATAPTAQAPRTGPPRATVHRPLAATSPAQSPETTPLWATAGPSSTTFQAPLGPSPTTPPAAERTSTTSQAPTRPAPTTLSTTTGPAPTTPVATTVPAPTTPRTPTPDLPSSSNSSVLPTPPATEAPSSPPPEYVCNCSVVGSLNVNRCNQTTGQCECRPGYQGLHCETCKEGFYLNYTSGLCQPCDCSPHGALSIPCNSSGKCQCKVGVIGSICDRCQDGYYGFSKNGCLPCQCNNRSASCDALTGACLNCQENSKGNHCEECKEGFYQSPDATKECLRCPCSAVTSTGSCSIKSSELEPECDQCKDGYIGPNCNKCENGYYNFDSICRKCQCHGHVDPVKTPKICKPESGECINCLHNTTGFWCENCLEGYVHDLEGNCIKKEVILPTPEGSTILVSNASLTTSVPTPVINSTFTPTTLQTIFSVSTSENSTSALADVSWTQFNIIILTVIIIVVVLLMGFVGAVYMYREYQNRKLNAPFWTIELKEDNISFSSYHDSIPNADVSGLLEDDGNEVAPNGQLTLTTPIHNYKA

SEQ ID NO: 274 - protein, 318 aa, Homo sapiens
MRLLAGWLCLSLASVWLARRMWTLRSPLTRSLYVNMTSGPGGPAAAAGGRKENHQWYVCNREKLCESLQAVFVQSYLDQGTQIFLNNSIEKSGWLFIQLYHSFVSSVFSLFMSRTSINGLLGRGSMFVFSPDQFQRLLKINPDWKTHRLLDLGAGDGEVTKIMSPHFEEIYATELSETMIWQLQKKKYRVLGINEWQNTGFQYDVISCLNLLDRCDQPLTLLKDIRSVLEPTRGRVILALVLPFHPYVENVGGKWEKPSEILEIKGQNWEEQVNSLPEVFRKAGFVIEAFTRLPYLCEGDMYNDYYVLDDAVFVLKPV

SEQ ID NO: 275 - protein, 455 aa, Homo sapiens
MGWGGGGGCTPRPPIHQQPPERRVVTVVFLGLLLDLLAFTLLLPLLPGLLESHGRAHDPLYGSWQGGVDWFATAIGMPVEKRYNSVLFGGLIGSAFSVLQFLCAPLTGATSDCLGRRPVMLLCLMGVATSYAVWATSRSFAAFLASRLIGGISKGNVSLSTAIVADLGSPLARSQGMAVIGVAFSLGFTLGPMLGASLPLEMAPWFALLFAASDLLFIFCFLPETLPLEKRAPSIALGFRDAADLLSPLALLRFSAVARGQDPPSGDRLSSLRRLGLVYFLYLFLFSGLEYTLSFLTHQRFQFSSLQQGKMFFLIGLTMATIQGAYARRIHPGGEVAAVKRALLLLVPAFLLIGWGRSLPVLGLGLLLYSFAAAVVVPCLSSVVAGYGSPGQKGTVMGTLRSLGALARAAGPLVAASVYWLAGAQACFTTWSGLFLLPFFLLQKLSYPAQTLKAE

SEQ ID NO: 276 - protein, 1067 aa, Homo sapiens [sequence omitted]

SEQ ID NO: 277 - protein, 467 aa, Homo sapiens [sequence omitted]

SEQ ID NO: 278 - protein, 582 aa, Homo sapiens
MSIETLLEAARFLEWQAQQQQRAREEQERLRLEQEREQEQKKANSLARLAHTLPVEEPRMEAPPLPLSPPAPPPAPPPPLATPAPLTVIPIPVVTNSPQPLPPPPPLPAAAQPLPLAPRQPALVGAPGLSIKEPAPLPSRPQVPTPAPLLPDSKATIPPNGSPKPLQPLPTPVLTIAPHPGVQPQLAPQQPPPPTLGTLKLAPAEEVKSSEQKKRPGGIGTREVHNKLEKNRRAHLKECFETLKRNIPNVDDKKTSNLSVLRTALRYIQSLKRKEKEYEHEMERLAREKIATQQRLAELKHELSQWMDVLEIDRVLRQTGQPEDDQASTSTASEGEDNIDEDMEEDRAGLGPPKLSHRPQPELLKSTLPPPSTTPAPLPPHPHPHPHSVALPPAHLPVQQQQPQQKTPLPAPPPPPAAPAQTLVPAPAHLVATAGGGSTVIAHTATTHASVIQTVNHVLQGPGGKHIAHIAPSAPSPAVQLAPATPPIGHITVHPATLNHVAHLGSQLPLYPQPVAVSHIAHTLSHQQVNGTAGLGPPATVMAKPAVGAQVVHHPQLVGQTVLNPVTMVTMPSFPVSTLKLA

SEQ ID NO: 279 - protein, 258 aa, Homo sapiens
MAASVLNTVLRRLPMLSLFRGSHRVQVPLQTLCTKAPSEEDSLSSVPISPYKDEPWKYLESEEYQERYGSRPVWADYRRNHKGGVPPQRTRKTCIRRNKVVGNPCPICRDHKLHVDFRNVKLLEQFVCAHTGIIFYAPYTGVCVKQHKRLTQAIQKARDHGLLIYHIPQVEPRDLDFSTSHGAVSATPPAPTLVSGDPWYPWYNWKQPPERELSRLRRLYQGHLQEESGPPPESMPKMPPRTPAEASSTGQTGPQSAL

SEQ ID NO: 280 - protein, 750 aa, Homo sapiens
MLRAKNQLFLLSPHYLRQVKESSGSRLIQQRLLHQQQPLHPEWAALAKKQLKGKNPEDLIWHTPEGISIKPLYSKRDTMDLPEELPGVKPFTRGPYPTMYTFRPWTIRQYAGFSTVEESNKFYKDNIKAGQQGLSVAFDLATHRGYDSDNPRVRGDVGMAGVAIDTVEDTKILFDGIPLEKMSVSMTMNGAVIPVLANFIVTGEEQGVPKEKLTGTIQNDILKEFMVRNTYIFPPEPSMKIIADIFEYTAKHMPKFNSISISGYHMQEAGADAILELAYTLADGLEYSRTGLQAGLTIDEFAPRLSFFWGIGMNFYMEIAKMRAGRRLWAHLIEKMFQPKNSKSLLLRAHCQTSGWSLTEQDPYNNIVRTAIEAMAAVFGGTQSLHTNSFDEALGLPTVKSARIARNTQIIIQEESGIPKVADPWGGSYMMECLTNDVYDAALKLINEIEEMGGMAKAVAEGIPKLRIEECAARRQARIDSGSEVIVGVNKYQLEKEDAVEVLAIDNTSVRNRQIEKLKKIKSSRDQALAERCLAALTECAASGDGNILALAVDASRARCTVGEITDALKKVFGEHKANDRMVSGAYRQEFGESKEITSAIKRVHKFMEREGRRPRLLVAKMGQDGHDRGAKVIATGFADLGFDVDIGPLFQTPREVAQQAVDADVHAVGISTLAAGHKTLVPELIKELNSLGRPDILVMCGGVIPPQDYEFLFEVGVSNVFGPGTRIPKAAVQVLDDIEKCLEKKQQSV

SEQ ID NO: 281 - protein, 662 aa, Homo sapiens
MVVSEVDIAKADPAAASHPLLLNGDATVAQKNPGSVAENNLCSQYEEKVRPCIDLIDSLRALGVEQDLALPAIAVIGDQSSGKSSVLEALSGVALPRGSGIVTRCPLVLKLKKLVNEDKWRGKVSYQDYEIEISDASEVEKEINKAQNAIAGEGMGISHELITLEISSRDVPDLTLIDLPGITRVAVGNQPADIGYKIKTLIKKYIQRQETISLVVVPSNVDIATTEALSMAQEVDPEGDRTIGILTKPDLVDKGTEDKVVDVVRNLVFHLKKGYMIVKCRGQQEIQDQLSLSEALQREKIFFENHPYFRDLLEEGKATVPCLAEKLTSELITHICKSLPLLENQIKETHQRITEELQKYGVDIPEDENEKMFFLIDKVNAFNQDITALMQGEETVGEEDIRLFTRLRHEFHKWSTIIENNFQEGHKILSRKIQKFENQYRGRELPGFVNYRTFETIVKQQIKALEEPAVDMLHTVTDMVRLAFTDVSIKNFEEFFNLHRTAKSKIEDIRAEQEREGEKLIRLHFQMEQIVYCQDQVYRGALQKVREKELEEEKKKKSWDFGAFQSSSATDSSMEEIFQHLMAYHQEASKRISSHIPLIIQFFMLQTYGQQLQKAMLQLLQDKDTYSWLLKERSDTSDKRKFLKERLARLTQARRRLAQFPG

SEQ ID NO: 282 - protein, 172 aa, Homo sapiens
MSSKRAKAKTTKKRPQRATSNVFAMFDQSQIQEFKEAFNMIDQNRDGFIDKEDLHDMLASLGKNPTDEYLEGMMSEAPGPINFTMFLTMFGEKLNGTDPEDVIRNAFACFDEEASGFIHEDHLRELLTTMGDRFTDEEVDEMYREAPIDKKGNFNYVEFTRILKHGAKDKDD

SEQ ID NO: 283 - protein, 1465 aa, Homo sapiens
MSLVTVPFYQKRHRHFDQSYRNIQTRYLLDEYASKKRASTQASSQKSLSQRSSSQRASSQTSLGGTICRVCAKRVSTQEDEEQENRSRYQSLVAAYGEAKRQRFLSELAHLEEDVHLARSQARDKLDKYAIQQMMEDKLAWERHTFEERISRAPEILVRLRSHTVWERMSVKLCFTVQGFPTPVVQWYKDGSLICQAAEPGKYRIESNYGVHTLEINRADFDDTATYSAVATNAHGQVSTNAAVVVRRFRGDEEPFRSVGLPIGLPLSSMIPYTHFDVQFLEKFGVTFRREGETVTLKCTMLVTPDLKRVQPRAEWYRDDVLLKESKWTKMFFGEGQASLSFSHLHKDDEGLYTLRIVSRGGVSDHSAFLFVRDADPLVTGAPGAPMDLQCHDANRDYVIVTWKPPNTTTESPVMGYFVDRCEVGTNNWVQCNDAPVKICKYPVTGLFEGRSYIFRVRAVNSAGISRPSRVSDAVAALDPLDLRRLQAVHLEGEKEIAIYQDDLEGDAQVPGPPTGVHASEISRNYVVLSWEPPTPRGKDPLMYFIEKSVVGSGSWQRVNAQTAVRSPRYAVFDLMEGKSYVFRVLSANRHGLSEPSEITSPIQAQDVTVVPSAPGRVLASRNTKTSVVVQWDRPKHEEDLLGYYVDCCVAGTNLWEPCNHKPIGYNRFVVHGLTTGEQYIFRVKAVNAVGMSENSQESDVIKVQAALTVPSHPYGITLLNCDGHSMTLGWKVPKFSGGSPILGYYLDKREVHHKNWHEVNSSPSKPTILTVDGLTEGSLYEFKIAAVNLAGIGEPSDPSEHFKCEAWTMPEPGPAYDLTFCEVRDTSLVMLWKAPVYSGSSPVSGYFVDFREEDAGEWITVNQTTTASRYLKVSDLQQGKTYVFRVRAVNANGVGKPSDTSEPVLVEARPGTKEISAGVDEQGNIYLGFDCQEMTDASQFTWCKSYEEISDDERFKIETVGDHSKLYLKNPDKEDLGTYSVSVSDTDGVSSSFVLDPEELERLMALSNEIKNPTIPLKSELAYEIFDKGRVRFWLQAEHLSPDASYRFIINDREVSDSEIHRIKCDKATGIIEMVMDRFSIENEGTYTVQIHDGKAKSQSSLVLIGDAFKTVLEEAEFQRKEFLRKQGPHFAEYLHWDVTEECEVRLVCKVANTKKETVFKWLKDDVLYETETLPNLERGICELLIPKLSKKDHGEYKATLKDDRGQDVSILEIAGKVYDDMILAMSRVCGKSASPLKVLCTPEGIRLQCFMKYFTDEMKVNWCHKDAKISSSEHMRIGGSEEMAWLQICEPTEKDKGKYTFEIFDGKDNHQRSLDLSGQAFDEAFAEFQQFKAAAFAEKNRGRLIGGLPDVVTIMEGKTLNLTCTVFGNPDPEVIWFKNDQDIQLSEHFSVKVEQAKYVSMTIKGVTSEDSGKYSINIKNKYGGEKIDVTVSVYKHGEKIPDMAPPQQAKPKLIPASASAAGQ

SEQ ID NO: 284 - protein, 390 aa, Homo sapiens
MRTRTGSQLAAREVTGSGAVPRQLEGRRCQAGRDANGGTSSDGSSSMAAIYGGVEGGGTRSEVLLVSEDGKILAEADGLSTNHWLIGTDKCVERINEMVNRAKRKAGVDPLVPLRSLGLSLSGGDQEDAGRILIEELRDRFPYLSESYLITTDAAGSIATATPDGGVVLISGTGSNCRLINPDGSESGCGGWGHMMGDEGSAYWIAHQAVKIVFDSIDNLEAAPHDIGYVKQAMFHYFQVPDRLGILTHLYRDFDKCRFAGFCRKIAEGAQQGDPLSRYIFRKAGEMLGRHIVAVLPEIDPVLFQGKIGLPILCVGSVWKSWELLKEGFLLALTQGREIQAQNFFSSFTLMKLRHSSALGGASLGARHIGHLLPMDYSANAIAFYSYTFS

SEQ ID NO: 285 - protein, 307 aa, Homo sapiens
MEADKDDTQQILKEHSPDEFIKDEQNKGLIDEITKKNIQLKKEIQKLETELQEATKEFQIKEDIPETKMKFLSVETPENDSQLSNISCSFQVSSKVPYEIQKGQALITFEKEEVAQNVVSMSKHHVQIKDVNLEVTAKPVPLNSGVRFQVYVEVSKMKINVTEIPDTLREDQMRDKLELSFSKSRNGGGEVDRVDYDRQSGSAVITFVEIGVADKILKKKEYPLYINQTCHRVTVSPYTEIHLKKYQIFSGTSKRTVLLTGMEGIQMDEEIVEDLINIHFQRAKNGGGEVDVVKCSLGQPHIAYFEE

SEQ ID NO: 286 - protein, 423 aa, Homo sapiens
MAICQFFLQGRCRFGDRCWNEHPGARGAGGGRQQPQQQPSGNNRRGWNTTSQRYSNVIQPSSFSKSTPWGGSRDQEKPYFSSFDSGASTNRKEGFGLSENPFASLSPDEQKDEKKLLEGIVKDMEVWESSGQWMFSVYSPVKKKPNISGFTDISPEELRLEYHNFLTSNNLQSYLNSVQRLINQWRNRVNELKSLNISTKVALLSDVKDGVNQAAPAFGFGSSQAATFMSPGFPVNNSSSDNAQNFSFKTNSGFAAASSGSPAGFGSSPAFGAAASTSSGISTSAPAFGFGKPEVTSAASFSFKSPAASSFGSPGFSGLPASLATGPVRAPVAPAFGGGSSVAGFGSPGSHSHTAFSKPSSDTFGNSSISTSLSASSSIIATDNVLFTPRDKLTVEELEQFQSKKFTLGKIPLKPPPLELLNV

SEQ ID NO: 287 - protein, 368 aa, Homo sapiens
MQPGSSRCEEETPSLLWGLDPVFLAFAKLYIRDILDMKESRQVPGVFLYNGHPIKQVDVLGTVIGVRERDAFYSYGVDDSTGVINCICWKKLNTESVSAAPSAARELSLTSQLKKLQETIEQKTKIEIGDTIRVRGSIRTYREEREIHATTYYKVDDPVWNIQIARMLELPTIYRKVYDQPFHSSALEKEEALSNPGALDLPSLTSLLSEKAKEFLMENRVQSFYQQELEMVESLLSLANQPVIHSASSDQVNFKKDTTSKAIHSIFKNAIQLLQEKGLVFQKDDGFDNLYYVTREDKDLHRKIHRIIQQDCQKPNHMEKGCHFLHILACARLSIRPGLSEAVLQQVLELLEDQSDIVSTMEHYYTAF

SEQ ID NO: 288 - protein, 736 aa, Homo sapiens
MASIMEGPLSKWTNVMKGWQYRWFVLDYNAGLLSYYTSKDKMMRGSRRGCVRLRGAVIGIDDEDDSTFTITVDQKTFHFQARDADEREKWIHALEETILRHTLQLQGLDSGFVPSVQDFDKKLTEADAYLQILIEQLKLFDDKLQNCKEDEQRKKIETLKETTNSMVESIKHCIVLLQIAKDQSNAEKHADGMISTINPVDAIYQPSPLEPVISTMPSQTVLPPEPVQLCKSEQRPSSLPVGPVLATLGHHQTPTPNSTGSGHSPPSSSLTSPSHVNLSPNTVPEFSYSSSEDEFYDADEFHQSGSSPKRLIDSSGSASVLTHSSSGNSLKRPDTTESLNSSLSNGTSDADLFDSHDDRDDDAEAGSVEEHKSVIMHLLSQVRLGMDLTKVVLPTFILERRSLLEMYADFFAHPDLFVSISDQKDPKDRMVQVVKWYLSAFHAGRKGSVAKKPYNPILGEIFQCHWTLPNDTEENTELVSEGPVPWVSKNSVTFVAEQVSHHPPISAFYAECFNKKIQFNAHIWTKSKFLGMSIGVHNIGQGCVSCLDYDEHYILTFPNGYGRSILTVPWVELGGECNINCSKTGYSANIIFHTKPFYGGKKHRITAEIFSPNDKKSFCSIEGEWNGVMYAKYATGENTVFVDTKKLPIIKKKVRKLEDQNEYESRSLWKDVTFNLKIRDIDAATEAKHRLEERQRAEARERKEKEIQWETRLFHEDGECWVYDEPLLKRLGAAKH

SEQ ID NO: 289 - protein, 392 aa, Homo sapiens
MGVNQSVGFPPVTGPHLVGCGDVMEGQNLQGSFFRLFYPCQKAEETMEQPLWIPRYEYCTGLAEYLQFNKRCGGLLFNLAVGSCRLPVSWNGPFKTKDSGYPLIIFSHGLGAFRTLYSAFCMELASRGFVVAVPEHRDRSAATTYFCKQAPEENQPTNESLQEEWIPFRRVEEGEKEFHVRNPQVHQRVSECLRVLKILQEVTAGQTVFNILPGGLDLMTLKGNIDMSRVAVMGHSFGGATAILALAKETQFRCAVALDAWMFPLERDFYPKARGPVFFINTEKFQTMESVNLMKKICAQHEQSRIITVLGSVHRSQTDFAFVTGNLIGKFFSTETRGSLDPYEGQEVMVRAMLAFLQKHLDLKEDYNQWNNLIEGIGPSLTPGAPHHLSSL

SEQ ID NO: 290 - protein, 379 aa, Homo sapiens
MAWRGWAQRGWGCGQAWGASVGGRSCEELTAVLTPPQLLGRRFNFFIQQKCGFRKAPRKVEPRRSDPGTSGEAYKRSALIPPVEETVFYPSPYPIRSLIKPLFFTVGFTGCAFGSAAIWQYESLKSRVQSYFDGIKADWLDSIRPQKEGDFRKEINKWWNNLSDGQRTVTGIIAANVLVFCLWRVPSLQRTMIRYFTSNPASKVLCSPMLLSTFSHFSLFHMAANMYVLWSFSSSIVNILGQEQFMAVYLSAGVISNFVSYVGKVATGRYGPSLGASGAIMTVLAAVCTKIPEGRLAIIFLPMFTFTAGNALKAIIAMDTAGMILGWKFFDHAAHLGGALFGIWYVTYGHELIWKNREPLVKIWHEIRTNGPKKGGGSK

SEQ ID NO: 291 - protein, 125 aa, Homo sapiens
MADEELEALRRQRLAELQAKHGDPGDAAQQEAKHREAEMRNSILAQVLDQSARARLSNLALVKPEKTKAVENYLIQMARYGQLSEKVSEQGLIEILKKVSQQTEKTTTVKFNRRKVMDSDEDDDY

SEQ ID NO: 292 - protein, 345 aa, Homo sapiens
MSLFGLLLLTSALAGQRQGTQAESNLSSKFQFSSNKEQNGVQDPQHERIITVSTNGSIHSPRFPHTYPRNTVLVWRLVAVEENVWIQLTFDERFGLEDPEDDICKYDFVEVEEPSDGTILGRWCGSGTVPGKQISKGNQIRIRFVSDEYFPSEPGFCIHYNIVMPQFTEAVSPSVLPPSALPLDLLNNAITAFSTLEDLIRYLEPERWQLDLEDLYRPTWQLLGKAFVFGRKSRVVDLNLLTEEVRLYSCTPRNFSVSIREELKRTDTIFWPGCLLVKRCGGNCACCLHNCNECQCVPSKVTKKYHEVLQLRPKTGVRGLHKSLTDVALEHHEECDCVCRGSTGG

SEQ ID NO: 293 - protein, 272 aa, Homo sapiens
MAAKVFESIGKFGLALAVAGGVVNSALYNVDAGHRAVIFDRFRGVQDIVVGEGTHFLIPWVQKPIIFDCRSRPRNVPVITGSKDLQNVNITLRILFRPVASQLPRIFTSIGEDYDERVLPSITTEILKSVVARFDAGELITQRELVSRQVSDDLTERAATFGLILDDVSLTHLTFGKEFTEAVEAKQVAQQEAERARFVVEKAEQQKKAAIISAEGDSKAAELIANSLATAGDGLIELRKLEAAEDIAYQLSRSRNITYLPAGQSVLLQLPQ

SEQ ID NO: 294 - protein, 2039 aa, Homo sapiens
MDIVDTFNHLIPTEHLDDALFLGSNLENEVCEDFSASQNVLEDSLKNMLSDKDPMLGSASNQFCLPVLDSNDPNFQMPCSTVVGLDDIMDEGVVKESGNDTIDEEELILPNRNLRDKVEENSVRSPRKSPRLMAQEQVRSLRQSTIAKRSNAAPLSNTKKASGKTVSTAKAGVKQPERSQVKEEVCMSLKPEYHKENRRCSRNSGQIEVVPEVSVSSSHSSVSSCLEMKDEDGLDSKHKCNNPGEIDVPSHELNCSLLSETCVTIGEKKNEALMECKAKPVGSPLFKFSDKEEHEQNDSISGKTGETVVEEMIATRKVEQDSKETVKLSHEDDHILEDAGSSDISSDAACTNPNKTENSLVGLPSCVDEVTECNLELKDTMGIADKTENTLERNKIEPLGYCEDAESNRQLESTEFNKSNLEVVDTSTFGPESNILENAICDVPDQNSKQLNAIESTKIESHETANLQDDRNSQSSSVSYLESKSVKSKHTKPVIHSKQNMTTDAPKKIVAAKYEVIHSKTKVNVKSVKRNTDVPESQQNFHRPVKVRKKQIDKEPKIQSCNSGVKSVKNQAHSVLKKTLQDQTLVQIFKPLTHSLSDKSHAHPGCLKEPHHPAQTGHVSHSSQKQCHKPQQQAPAMKTNSHVKEELEHPGVEHFKEEDKLKLKKPEKNLQPRQRRSSKSFSLDEPPLFIPDNIATIRREGSDHSSSFESKYMWTPSKQCGFCKKPHGNRFMVGCGRCDDWFHGDCVGLSLSQAQQMGEEDKEYVCVKCCAEEDKKTEILDPDTLENQATVEFHSGDKTMECEKLGLSKHTTNDRTKYIDDTVKHKVKILKRESGEGRNSSDCRDNEIKKWQLAPLRKMGQPVLPRRSSEEKSEKIPKESTTVTCTGEKASKPGTHEKQEMKKKKVEKGVLNVHPAASASKPSADQIRQSVRHSLKDILMKRLTDSNLKVPEEKAAKVATKIEKELFSFFRDTDAKYKNKYRSLMFNLKDPKNNILFKKVLKGEVTPDHLIRMSPEELASKELAAWRRRENRHTIEMIEKEQREVERRPITKITHKGEIEIESDAPMKEQEAAMEIQEPAANKSLEKPEGSEKQKEEVDSMSKDTTSQHRQHLFDLNCKICIGRMAPPVDDLSPKKVKVVVGVARKHSDNEAESIADALSSTSNILASEFFEEEKQESPKSTFSPAPRPEMPGTVEVESTFLARLNFIWKGFINMPSVAKFVTKAYPVSGSPEYLTEDLPDSIQVGGRISPQTVWDYVEKIKASGTKEICVVRFTPVTEEDQISYTLLFAYFSSRKRYGVAANNMKQVKDMYLIPLGATDKIPHPLVPFDGPGLELHRPNLLLGLIIRQKLKRQHSACASTSHIAETPESAPPIALPPDKKSKIEVSTEEAPEEENDFFNSFTTVLHKQRNKPQQNLQEDLPTAVEPLMEVTKQEPPKPLRFLPGVLIGWENQPTTLELANKPLPVDDILQSLLGTTGQVYDQAQSVMEQNTVKEIPFLNEQTNSKIEKTDNVEVTDGENKEIKVKVDNISESTDKSAEIETSVVGSSSISAGSLTSLSLRGKPPDVSTEAFLTNLSIQSKQEETVESKEKTLKRQLQEDQENNLQDNQTSNSSPCRSNVGKGNIDGNVSCSENLVANTARSPQFINLKRDPRQAAGRSQPVTTSESKDGDSCRNGEKHMLPGLSHNKEHLTEQINVEEKLCSAEKNSCVQQSDNLKVAQNSPSVENIQTSQAEQAKPLQEDILMQNIETVHPFRRGSAVATSHFEVGNTCPSEFPSKSITFTSRSTSPRTSTNFSPMRPQQPNLQHLKSSPPGFPFPGPPNFPPQSMFGFPPHLPPPLLPPPGFGFAQNPMVPWPPVVHLPGQPQRMMGPLSQASRYIGPQNFYQVKDIRRPERRHSDPWGRQDQQQLDRPFNRGKGDRQRFYSDSHHLKRERHEKEWEQESERHRRRDRSQDKDRDRKSREEGHKDKERARLSHGDRGTDGKASRDSRNVDKKPDKPKSEDYEKDKEREKSKHREGEKDRDRYHKDRDHTDRTKSKR

SEQ ID NO: 295 - protein, 115 aa, Homo sapiens
MQAQAPVVVVTQPGVGPGPAPQNSNWQTGMCDCFSDCGVCLCGTFCFPCLGCQVAADMNECCLCGTSVAMRTLYRTRYGIPGSICDDYMATLCCPHCTLCQIKRDINRRRAMRTF

SEQ ID NO: 296 - protein, 1163 aa, Homo sapiens
MPVSTSLHQDGSQERPVSLTSTTSSSGSSCDSRSAMEEPSSSEAPAKNGAGSLRSRHLPNSNNNSSSWLNVKGPLSPFNSRAAAGPAHHKLSYLGRVVREIVETERMYVQDLRSIVESQEFDIYTQYCNNYPNSVAALTECMRDKQQAKFFRDRQELLQHSLPLGSYLLKPVQRILKYHLLLQEIAKHFDEEEDGFEVVEDAIDTMTCVAWYINDMKRRHEHAVRLQEIQSLLINWKGPDLTTYGELVLEGTFRVHRVRNERTFFLFDKTLLITKKRGDHFVYKGNIPCSSLMLIESTRDSLCFTVTHYKHSKQQYSIQAKTVEEKRNWTHHIKRLILENHHATIPQKAKEAILEMDSYYPNRYRCSPERLKKAWSSQDEVSTNVRQGRRQSEPTKHLLRQLNEKARAAGMKGKGRRESESSRSSRRPSGRSPTSTEKRMSFESISSLPEVEPDPEAGSEQEVFSAVEGPSAEETPSDTESPEVLETQLDAHQGLLGMDPPGDMVDFVAAESTEDLKALSSEEEEEMGGAAQEPESLLPPSVLDQASVIAERFVSSFSRRSSVAQEDSKSSGFGSPRLVSRSSSVLSLEGSEKGLARHGSATDSLSCQLSPEVDISVGVATEDSPSVNGMEPPSPGCPVEPDRSSCKKKESALSTRDRLLLDKIKSYYENAEHHDAGFSVRRRESLSYIPKGLVRNSISRFNSLPRPDPEPVPPVGSKRQVGSRPTSWALFELPGPSQAVKGDPPPISDAEFRPSSEIVKIWEGMESSGGSPGKGPGQGQANGFDLHEPLFILEEHELGAITEESATASPESSSPTEGRSPAHLARELKELVKELSSSTQGELVAPLHPRIVQLSHVMDSHVSERVKNKVYQLARQYSLRIKSNKPVMARPPLQWEKVAPERDGKSPTVPCLQEEAGEPLGGKGKRKPVLSLFDYEQLMAQEHSPPKPSSAGEMSPQRFFFNPSAVSQRTTSPGGRPSARSPLSPTETFSWPDVRELCSKYASRDEARRAGGGRPRGPPVNRSHSVPENMVEPPLSGRVGRCRSLSTKRGRGGGEAAQSPGPLPQSKPDGGETLYVTADLTLEDNRRVIVMEKGPLPSPTAGLEESSGQGPSSPVALLGQVQDFQQSAECQPKEEGSRDPADPSQQGRVRNLREKFQALNSVG

SEQ ID NO: 297 - protein, 1019 aa, Homo sapiens
MEPGEVKDRILENISLSVKKLQSYFAACEDEIPAIRNHDKVLQRLCEHLDHALLYGLQDLSSGYWVLVVHFTRREAIKQIEVLQHVATNLGRSRAWLYLALNENSLESYLRLFQENLGLLHKYYVKNALVCSHDHLTLFLTLVSGLEFIRFELDLDAPYLDLAPYMPDYYKPQYLLDFEDRLPSSVHGSDSLSLNSFNSVTSTNLEWDDSAIAPSSEDYDFGDVFPAVPSVPSTDWEDGDLTDTVSGPRSTASDLTSSKASTRSPTQRQNPFNEEPAETVSSSDTTPVHTTSQEKEEAQALDPPDACTELEVIRVTKKKKIGKKKKSRSDEEASPLHPACSQKKCAKQGDGDSRNGSPSLGRDSPDTMLASPQEEGEGPSSTTESSERSEPGLLIPEMKDTSMERLGQPLSKVIDQLNGQLDPSTWCSRAEPPDQSFRTGSPGDAPERPPLCDFSEGLSAPMDFYRFTVESPSTVTSGGGHHDPAGLGQPLHVPSSPEAAGQEEEGGGGEGQTPRPLEDTTREAQELEAQLSLVREGPVSEPEPGTQEVLCQLKRDQPSPCLSSAEDSGVDEGQGSPSEMVHSSEFRVDNNHLLLLMIHVFRENEEQLFKMIRMSTGHMEGNLQLLYVLLTDCYVYLLRKGATEKPYLVEEAVSYNELDYVSVGLDQQTVKLVCTNRRKQFLLDTADVALAEFFLASLKSAMIKGCREPPYPSILTDATMEKLALAKFVAQESKCEASAVTVRFYGLVHWEDPTDESLGPTPCHCSPPEGTITKEGMLHYKAGTSYLGKEHWKTCFVVLSNGILYQYPDRTDVIPLLSVNMGGEQCGGCRRANTTDRPHAFQVILSDRPCLELSAESEAEMAEWMQHLCQAVSKGVIPQGVAPSPCIPCCLVLTDDRLFTCHEDCQTSFFRSLGTAKLGDISAVSTEPGKEYCVLEFSQDSQQLLPPWVIYLSCTSELDRLLSALNSGWKTIYQVDLPHTAIQEASNKKKFEDALSLIHSAWQRSDSLCRGRASRDPWC

SEQ ID NO: 298 - protein, 275 aa, Homo sapiens
MPYANQPTVRITELTDENVKFIIENTDLAVANSIRRVFIAEVPIIAIDWVQIDANSSVLHDEFIAHRLGLIPLISDDIVDKLQYSRDCTCEEFCPECSVEFTLDVRCNEDQTRHVTSRDLISNSPRVIPVTSRNRDNDPNDYVEQDDILIVKLRKGQELRLRAYAKKGFGKEHAKWNPTAGVAFEYDPDNALRHTVYPKPEEWPKSEYSELDEDESQAPYDPNGKPERFYYNVESCGSLRPETIVLSALSGLKKKLSDLQTQLSHEIQSDVLTIN

SEQ ID NO: 299 - protein, 330 aa, Homo sapiens
MSDSEKLNLDSIIGRLLEVQGSRPGKNVQLTENEIRGLCLKSREIFLSQPILLELEAPLKICGDIHGQYYDLLRLFEYGGFPPESNYLFLGDYVDRGKQSLETICLLLAYKIKYPENFFLLRGNHECASINRIYGFYDECKRRYNIKLWKTFTDCFNCLPIAAIVDEKIFCCHGGLSPDLQSMEQIRRIMRPTDVPDQGLLCDLLWSDPDKDVQGWGENDRGVSFTFGAEVVAKFLHKHDLDLICRAHQVVEDGYEFFAKRQLVTLFSAPNYCGEFDNAGAMMSVDETLMCSFQILKPADKNKGKYGQFSGLNPGGRPITPPRNSAKAKK

SEQ ID NO: 300 - protein, 327 aa, Homo sapiens
MADGELNVDSLITRLLEVRGCRPGKIVQMTEAEVRGLCIKSREIFLSQPILLELEAPLKICGDIHGQYTDLLRLFEYGGFPPEANYLFLGDYVDRGKQSLETICLLLAYKIKYPENFFLLRGNHECASINRIYGFYDECKRRFNIKLWKTFTDCFNCLPIAAIVDEKIFCCHGGLSPDLQSMEQIRRIMRPTDVPDTGLLCDLLWSDPDKDVQGWGENDRGVSFTFGADVVSKFLNRHDLDLICRAHQVVEDGYEFFAKRQLVTLFSAPNYCGEFDNAGGMMSVDETLMCSFQILKPSEKKAKYQYGGLNSGRPVTPPRTANPPKKR

SEQ ID NO: 301 - protein, 126 aa, Homo sapiens
MAEAGAGLSETVTETTVTVTTEPENRSLTIKLRKRKPEKKVEWTSDTVDNEHMGRRSSKCCCIYEKPRAFGESSTESDEEEEEGCGHTHCVRGHRKGRRRATLGPTPTTPPQPPDPSQPPPGPMQH

SEQ ID NO: 302 - protein, 676 aa, Homo sapiens
MRVLGGRCGALLACLLLVLPVSEANFLSKQQASQVLVRKRRANSLLEETKQGNLERECIEELCNKEEAREVFENDPETDYFYPKYLVCLRSFQTGLFTAARQSTNAYPDLRSCVNAIPDQCSPLPCNEDGYMSCKDGKASFTCTCKPGWQGEKCEFDINECKDPSNINGGCSQICDNTPGSYHCSCKNGFVMLSNKKDCKDVDECSLKPSICGTAVCKNIPGDFECECPEGYRYNLKSKSCEDIDECSENMCAQLCVNYPGGYTCYCDGKKGFKLAQDQKSCEVVSVCLPLNLDTKYELLYLAEQFAGVVLYLKFRLPEISRFSAEFDFRTYDSEGVILYAESIDHSAWLLIALRGGKIEVQLKNEHTSKITTGGDVINNGLWNMVSVEELEHSISIKIAKEAVMDINKPGPLFKPENGLLETKVYFAGFPRKVESELIKPINPRLDGCIRSWNLMKQGASGIKEIIQEKQNKHCLVTVEKGSYYPGSGIAQFHIDYNNVSSAEGWHVNVTLNIRPSTGTGVMLALVSGNNTVPFAVSLVDSTSEKSQDILLSVENTVIYRIQALSLCSDQQSHLEFRVNRNNLELSTPLKIETISHEDLQRQLAVLDKAMKAKVATYLGGLPDVPFSATPVNAFYNGCMEVNINGVQLDLDEAISKHNDIRAHSCPSVWKKTKNS

SEQ ID NO: 303 - protein, 930 aa, Homo sapiens
MCSGSGRRRSSLSPTMRPGTGAERGGLMMGHPGMHYAPMGMHPMGQRANMPPVPHGMMPQMMPPMGGPPMGQMPGMMSSVMPGMMMSHMSQASMQPALPPGVNSMDVAAGTASGAKSMWTEHKSPDGRTYYYNTETKQSTWEKPDDLKTPAEQLLSKCPWKEYKSDSGKPYYYNSQTKESRWAKPKELEDLEGYQNTIVAGSLITKSNLHAMIKAEESSKQEECTTTSTAPVPTTEIPTTMSTMAAAEAAAAVVAAAAAAAAAAAAANANASTSASNTVSGTVPVVPEPEVTSIVATVVDNENTVTISTEEQAQLTSTPAIQDQSVEVSSNTGEETSKQETVADFTPKKEEEESQPAKKTYTWNTKEEAKQAFKELLKEKRVPSNASWEQAMKMIINDPRYSALAKLSEKKQAFNAYKVQTEKEEKEEARSKYKEAKESFQRFLENHEKMTSTTRYKKAEQMFGEMEVWNAISERDRLEIYEDVLFFLSKKEKEQAKQLRKRNWEALKNILDNMANVTYSTTWSEAQQYLMDNPTFAEDEELQNMDKEDALICFEEHIRALEKEEEEEKQKSLLRERRRQRKNRESFQIFLDELHEHGQLHSMSSWMELYPTISSDIRFTNMLGQPGSTALDLFKFYVEDLKARYHDEKKIIKDILKDKGFVVEVNTTFEDFVAIISSTKRSTTLDAGNIKLAFNSLLEKAEAREREREKEEARKMKRKESAFKSMLKQAAPPIELDAVWEDIRERFVKEPAFEDITLESERKRIFKDFMHVLEHECQHHHSKNKKHSKKSKKHHRKRSRSRSGSDSDDDDSHSKKKRQRSESRSASEHSSSAESERSYKKSKKHKKKSKKRRHKSDSPESDAEREKDKKEKDRESEKDRTRQRSESKHKSPKKKTGKDSGNWDTSGSELSEGELEKRRRTLLEQLDDDQ

SEQ ID NO: 304 - protein, 226 aa, Homo sapiens
MFTLLVLLSQLPTVTLGFPHCARGPKASKHAGEEVFTSKEEANFFIHRRLLYNRFDLELFTPGNLERECNEELCNYEEAREIFVDEDKTIAFWQEYSAKGPTTKSDGNREKIDVMGLLTGLIAAGVFLVIFGLLGYYLCITKCNRLQHPCSSAVYERGRHTPSIIFRRPEEAALSPLPPSVEDAGLPSYEQAVALTRKHSVSPPPPYPGHTKGFRVFKKSMSLPSH

SEQ ID NO: 305 - protein, 264 aa, Homo sapiens
MEAFLGSRSGLWAGGPAPGQFYRIPSTPDSFMDPASALYRGPITRTQNPMVTGTSVLGVKFEGGVVIAADMLGSYGSLARFRNISRIMRVNNSTMLGASGDYADFQYLKQVLGQMVIDEELLGDGHSYSPRAIHSWLTRAMYSRRSKMNPLWNTMVIGGYADGESFLGYVDMLGVAYEAPSLATGYGAYLAQPLLREVLEKQPVLSQTEARDLVERCMRVLYYRDARSYNRFQIATVTEKGVEIEGPLSTETNWDIAHMISGFE

SEQ ID NO: 306 - protein, 334 aa, Homo sapiens
MTRSLFKGNFWSADILSTIGYDNIIQHLNNGRKNCKEFEDFLKERAAIEERYGKDLLNLSRKKPCGQSEINTLKRALEVFKQQVDNVAQCHIQLAQSLREEARKMEEFREKQKLQRKKTELIMDAIHKQKSLQFKKTMDAKKNYEQKCRDKDEAEQAVSRSANLVNPKQQEKLFVKLATSKTAVEDSDKAYMLHIGTLDKVREEWQSEHIKACEAFEAQECERINFFRNALWLHVNQLSQQCVTSDEMYEQVRKSLEMCSIQRDIEYFVNQRKTGQIPPAPIMYENFYSSQKNAVPAGKATGPNLARRGPLPIPKSSPDDPNYSLVDDYSLLYQ

SEQ ID NO: 307 - protein, 415 aa, Homo sapiens
MPTTIEREFEELDTQRRWQPLYLEIRNESHDYPHRVAKFPENRNRNRYRDVSPYDHSRVKLQNAENDYINASLVDIEEAQRSYILTQGPLPNTCCHFWLMVWQQKTKAVVMLNRIVEKESVKCAQYWPTDDQEMLFKETGFSVKLLSEDVKSYYTVHLLQLENINSGETRTISHFHYTTWPDFGVPESPASFLNFLFKVRESGSLNPDHGPAVIHCSAGIGRSGTFSLVDTCLVLMEKGDDINIKQVLLNMRKYRMGLIQTPDQLRFSYMAIIEGAKCIKGDSSIQKRWKELSKEDLSPAFDHSPNKIMTEKYNGNRIGLEEEKLTGDRCTGLSSKMQDTMEENSESALRKRIREDRKATTAQKVQQMKQRLNENERKRKRWLYWQPILTKMGFMSVILVGAFVGWTLFFQQNAL

SEQ ID NO: 308 - protein, 481 aa, Homo sapiens
MAYNDTDRNQTEKLLKRVRELEQEVQRLKKEQAKNKEDSNIRENSAGAGKTKRAFDFSAHGRRHVALRIAYMGWGYQGFASQENTNNTIEEKLFEALTKTRLVESRQTSNYHRCGRTDKGVSAFGQVISLDLRSQFPRGRDSEDFNVKEEANAAAEEIRYTHILNRVLPPDIRILAWAPVEPSFSARFSCLERTYRYFFPRADLDIVTMDYAAQKYVGTHDFRNLCKMDVANGVINFQRTILSAQVQLVGQSPGEGRWQEPFQLCQFEVTGQAFLYHQVRCMMAILFLIGQGMEKPEIIDELLNIEKNPQKPQYSMAVEFPLVLYDCKFENVKWIYDQEAQEFNITHLQQLWANHAVKTHMLYSMLQGLDTVPVPCGIGPKMDGMTEWGNVKPSVIKQTSAFVEGVKMRTYKPLMDRPKCQGLESRIQHFVRRGRIEHPHLFHEEETKAKRDCNDTLEEENTNLETPTKRVCVDTEIKSII

SEQ ID NO: 309 - protein, 649 aa, Homo sapiens
MSLMVSAGRGLGAVWSPTHVQVTVLQARGLRAKGPGGTSDAYAVIQVGKEKYATSVSERSLGAPVWREEATFELPSLLSSGPAAAATLQLTVLHRALLGLDKFLGRAEVDLRDLHRDQGRRKTQWYKLKSKPGKKDKERGEIEVDIQFMRNNMTASMFDLSMKDKSRNPFGKLKDKIKGKNKDSGSDTASAIIPSTTPSVDSDDESVVKDKKKKSKIKTLLSKSNLQKTPLSQSMSVLPTSKPEKVLLRPGDFQSQWDEDDNEDESSSASDVMSHKRTASTDLKQLNQVNFTLPKKEGLSFLGGLRSKNDVLSRSNVCINGNHVYLEQPEAKGEIKDSSPSSSPSPKGFRKKHLFSSTENLAAGSWKEPAEGGGLSSDRQLSESSTKDSLKSMTLPSYRPAPLVSGDLRENMAPANSEATKEAKESKKPESRRSSLLSLMTGKKDVAKGSEGENPLTVPGREKEGMLMGVKPGEDASGPAEDLVRRSEKDTAAVVSRQGSSLNLFEDVQITEPEAEPESKSEPRPPISSPRAPQTRAVKPRLHPVKPMNAMATKVANCSLGTATIISENLNNEVMMKKYSPSDPAFAYAQLTHDELIQLVLKQKETISKKEFQVRELEDYIDNLLVRVMEETPNILRIPTQVGKKAGKM

SEQ ID NO: 310 - protein, 756 aa, Homo sapiens
MASAPPASPPGSEPPGPDPEPGGPDGPGAAQLAPGPAELRLGAPVGGPDPQSPGLDEPAPGAAADGGARWSAGPAPGLEGGPRDPGPSAPPPRSGPRGQLASPDAPGPGPRSEAPLPELDPLFSWTEEPEECGPASCPESAPFRLQGSSSSHRARGEVDVFSPFPAPTAGELALEQGPGSPPQPSDLSQTHPLPSEPVGSQEDGPRLRAVFDALDGDGDGFVRIEDFIQFATVYGAEQVKDLTKYLDPSGLGVISFEDFYQGITAIRNGDPDGQCYGGVASAQDEEPLACPDEFDDFVTYEANEVTDSAYMGSESTYSECETFTDEDTSTLVHPELQPEGDADSAGGSAVPSECLDAMEEPDHGALLLLPGRPHPHGQSVITVIGGEEHFEDYGEGSEAELSPETLCNGQLGCSDPAFLTPSPTKRLSSKKVARYLHQSGALTMEALEDPSPELMEGPEEDIADKVVFLERRVLELEKDTAATGEQHSRLRQENLQLVHRANALEEQLKEQELRACEMVLEETRRQKELLCKMEREKSIEIENLQTRLQQLDEENSELRSCTPCLKANIERLEEEKQKLLDEIESLTLRLSEEQENKRRMGDRLSHERHQFQRDKEATQELIEDLRKQLEHLQLLKLEAEQRRGRSSSMGLQEYHSRARESELEQEVRRLKQDNRNLKEQNEELNGQIITLSIQGAKSLFSTAFSESLAAEISSVSRDELMEAIQKQEEINFRLQDYIDRIIVAIMETNPSILEVK

SEQ ID NO: 311 - protein, 201 aa, Homo sapiens
MAGKSSLFKVILLGDGGVGKSSLMNRYVTNKFDTQLFHTIGVEFLNKDLEVDGHFVTMQIWDTAGQERFRSLRTPFYRGSDCCLLTFSVDDSQSFQNLSNWKKEFIYYADVKEPESFPFVILGNKIDISERQVSTEEAQAWCRDNGDYPYFETSAKDATNVAAAFEEAVRRVLATEDRSDHLIQTDTVNLHRKPKPSSSCC

SEQ ID NO: 312 - protein, 620 aa, Homo sapiens
MAAATADPGAGNPQPGDSSGGGAGGGLPSPGEQELSRRLQRLYPAVNQQETPLPRSWSPKDKYNYIGLSQGNLRVHYKGHGKNHKDAASVRATHPIPAACGIYYFEVKIVSKGRDGYMGIGLSAQGVNMNRLPGWDKHSYGYHGDDGHSFCSSGTGQPYGPTFTTGDVIGCCVNLINGTCFYTKNGHSLGIAFTDLPANLYPTVGLQTPGEIVDANFGQQPFLFDIEDYMREWRAKVQGTVHCFPISARLGEWQAVLQNMVSSYLVHHGYCATATAFARMTETPIQEEQASIKNRQKIQKLVLEGRVGEAIETTQRFYPGLLEHNPNLLFMLKCRQFVEMVNGTDSEVRSLSSRSPKSQDSYPGSPSLSPRHGPSSSHMHNTGADSPSCSNGVASTKSKQNHSKYPAPSSSSSSSSSSSSSSPSSVNYSESNSTDSTKSQHHSSTSNQETSDSEMEMEAEHYPNGVLGSMSTRIVNGAYKHEDLQTDESSMDDRHPRRQLCGGNQAATERIILFGRELQALSEQLGREYGKNLAHTEMLQDAFSLLAYSDPWSCPVGQQLDPIQREPVCAALNSAILESQNLPKQPPLMLALGQASECLRLMARAGLGSCSFARVDDYLH

SEQ ID NO: 313 - protein, 609 aa, Homo sapiens
MAGTLDLDKGCTVEELLRGCIEAFDDSGKVRDPQLVRMFLMMHPWYIPSSQLAAKLLHIYQQSRKDNSNSLQVKTCHLVRYWISAFPAEFDLNPELAEQIKELKALLDQEGNRRHSSLIDIDSVPTYKWKRQVTQRNPVGQKKRKMSLLFDHLEPMELAEHLTYLEYRSFCKILFQDYHSFVTHGCTVDNPVLERFISLFNSVSQWVQLMILSKPTAPQRALVITHFVHVAEKLLQLQNFNTLMAVVGGLSHSSISRLKETHSHVSPETIKLWEGLTELVTATGNYGNYRRRLAACVGFRFPILGVHLKDLVALQLALPDWLDPARTRLNGAKMKQLFSILEELAMVTSLRPPVQANPDLLSLLTVSLDQYQTEDELYQLSLQREPRSKSSPTSPTSCTPPPRPPVLEEWTSAAKPKLDQALVVEHIEKMVESVFRNFDVDGDGHISQEEFQIIRGNFPYLSAFGDLDQNQDGCISREEMVSYFLRSSSVLGGRMGFVHNFQESNSLRPVACRHCKALILGIYKQGLKCRACGVNCHKQCKDRLSVECRRRAQSVSLEGSAPSPSPMHSHHHRAFSFSLPRPGRRGSRPPEIREEEVQTVEDGVFDIHL

SEQ ID NO: 314 - protein, 689 aa, Homo sapiens
MGSSGLGKAATLDELLCTCIEMFDDNGELDNSYLPRIVLLMHRWYLSSTELAEKLLCMYRNATGESCNEFRLKICYFMRYWILKFPAEFNLDLGLIRMTEEFREVASQLGYEKHVSLIDISSIPSYDWMRRVTQRKKVSKKGKACLLFDHLEPIELAEHLTFLEHKSFRRISFTDYQSYVIHGCLENNPTLERSIALFNGISKWVQLMVLSKPTPQQRAEVITKFINVAKKLLQLKNFNTLMAVVGGLSHSSISRLKETHSHLSSEVTKNWNEMTELVSSNGNYCNYRKAFADCDGFKIPILGVHLKDLIAVHVIFPDWTEENKVNIVKMHQLSVTLSELVSLQNASHHLEPNMDLINLLTLSLDLYHTEDDIYKLSLVLEPRNSKSPTSPTTPNKPVVPLEWALGVMPKPDPTVINKHIRKLVESVFRNYDHDHDGYISQEDFESIAANFPFLDSFCVLDKDQDGLISKDEMMAYFLRAKSQLHCKMGPGFIHNFQEMTYLKPTFCEHCAGFLWGIIKQGYKCKDCGANCHKQCKDLLVLACRRFARAPSLSSGHGSLPGSPSLPPAQDEVFEFPGVTAGHRDLDSRAITLVTGSSRKISVRLQRATTSQATQTEPVWSEAGWGDSGSHTFPKMKSKFHDKAAKDKGFAKWENEKPRVHAGVDVVDRGTEFELDQDEGEETRQDGEDG

SEQ ID NO: 315 - protein, 373 aa, Homo sapiens
MLLGLAAMELKVWVDGIQRVVCGVSEQTTCQEVVIALAQAIGQTGRFVLVQRLREKERQLLPQECPVGAQATCGQFASDVQFVLRRTGASLAGRPSSDSCPPPERCLIRASLPVKPRAALGCEPRKTLTPEPAPSLSRPGPAAPVTPTPGCCTDLRGLELRVQRNAEELGHEAFWEQELRREQAREREGQARLQALSAATAEHAARLQALDAQARALEAELQLAAEAPGPPSPMASATERLHQDLAVQERQSAEVQGSLALVSRALEAAERALQAQAQELEELNRELRQCNLQQFIQQTGAALPPPPRPDRGPPGTQGPLPPAREESLLGAPSESHAGAQPRPRGGPHDAELLEVAAAPAPEWCPLAAQPQAL

SEQ ID NO: 316 - protein, 583 aa, Homo sapiens
MPKPINVRVTTMDAELEFAIQPNTTGKQLFDQVVKTVGLREVWFFGLQYVDSKGYSTWLKLNKKVTQQDVKKENPLQFKFRAKFFPEDVSEELIQEITQRLFFLQVKEAILNDEIYCPPETAVLLASYAVQAKYGDYNKEIHKPGYLANDRLLPQRVLEQHKLTKEQWEERIQNWHEEHRGMLREDSMMEYLKIAQDLEMYGVNYFEIKNKKGTELWLGVDALGLNIYEHDDKLTPKIGFPWSEIRNISFNDKKFVIKPIDKKAPDFVFYAPRLRINKRILALCMGNHELYMRRRKPDTIEVQQMKAQAREEKHQKQLERAQLENEKKKREIAEKEKERIEREKEELMERLKQIEEQTIKAQKELEEQTRKALELDQERKRAKEEAERLEKERRAAEEAKSAIAKQAADQMKNQEQLAAELAEFTAKIALLEEAKKKKEEEATEWQHKAFAAQEDLEKTKEELKTVMSAPPPPPPPPVIPPTENEHDEHDENNAEASAELSNEGVMNHRSEEERVTETQKNERVKKQLQALSSELAQARDETKKTQNDVLHAENVKAGRDKYKTLRQIRQGNTKQRIDEFEAM

SEQ ID NO: 317 - protein, 150 aa, Homo sapiens
MVLCFPLLLLLLVLWGPVCPLHAWPKRLTKAHWFEIQHIQPSPLQCNRAMSGINNYTQHCKHQNTFLHDSFQNVAAVCDLLSIVCKNRRHNCHQSSKPVNMTDCRLTSGKYPQCRYSAAAQYKFFIVACDPPQKSDPPYKLVPVHLDSIL

SEQ ID NO: 318 - protein, 372 aa, Homo sapiens
MKAGATSMWASCCGLLNEVMGTGAVRGQQSAFAGATGPFRFTPNPEFSTYPPAATEGPNIVCKACGLSFSVFRKKHVCCDCKKDFCSVCSVLQENLRRCSTCHLLQETAFQRPQLMRLKVKDLRQYLILRNIPIDTCREKEDLVDLVLCHHGLGSEDDMDTSSLNSSRSQTSSFFTRSFFSNYTAPSATMSSFQGELMDGDQTSRSGVPAQVQSEITSANTEDDDDDDDEDDDDEEENAEDRNPGLSKERVRASLSDLSSLDDVEGMSVRQLKEILARNFVNYSGCCEKWELVEKVNRLYKENEENQKSYGERLQLQDEEDDSLCRICMDAVIDCVLLECGHMVTCTKCGKRMSECPICRQYVVRAVHVFKS

SEQ ID NO: 319 - protein, 270 aa, Homo sapiens
MWNSGFESYGSSSYGGAGGYTQSPGGFGSPAPSQAEKKSRARAQHIVPCTISQLLSATLVDEVFRIGNVEISQVTIVGIIRHAEKAPTNIVYKIDDMTAAPMDVRQWVDTDDTSSENTVVPPETYVKVAGHLRSFQNKKSLVAFKIMPLEDMNEFTTHILEVINAHMVLSKANSQPSAGRAPISNPGMSEAGNFGGNSFMPANGLTVAQNQVLNLIKACPRPEGLNFQDLKNQLKHMSVSSIKQAVDFLSNEGHIYSTVDDDHFKSTDAE

SEQ ID NO: 320 - protein, 482 aa, Homo sapiens
MAAVFDLDLETEEGSEGEGEPELSPADACPLAELRAAGLEPVGHYEEVELTETSVNVGPERIGPHCFELLRVLGKGGYGKVFQVRKVQGTNLGKIYAMKVLRKAKIVRNAKDTAHTRAERNILESVKHPFIVELAYAFQTGGKLYLILECLSGGELFTHLEREGIFLEDTACFYLAEITLALGHLHSQGIIYRDLKPENIMLSSQGHIKLTDFGLCKESIHEGAVTHTFCGTIEYMAPEILVRSGHNRAVDWWSLGALMYDMLTGSPPFTAENRKKTMDKIIRGKLALPPYLTPDARDLVKKFLKRNPSQRIGGGPGDAADVQRHPFFRHMNWDDLLAWRVDPPFRPCLQSEEDVSQFDTRFTRQTPVDSPDDTALSESANQAFLGFTYVAPSVLDSIKEGFSFQPKLRSPRRLNSSPRAPVSPLKFSPFEGFRPSPSLPEPTELPLPPLLPPPPPSTTAPLPIRPPSGTKKSKRGRGRPGR

SEQ ID NO: 321 - protein, 208 aa, Homo sapiens [sequence omitted]

SEQ ID NO: 322 - protein, 92 aa, Homo sapiens
MTKLEEHLEGIVNIFHQYSVRKGHFDTLSKGELKQLLTKELANTIKNIKDKAVIDEIFQGLDANQDEQVDFQEFISLVAIALKAAHYHTHKE

SEQ ID NO: 323 - protein, 95 aa, Homo sapiens
MTELETAMGMIIDVFSRYSGSEGSTQTLTKGELKVLMEKELPGFLQSGKDKDAVDKLLKDLDANGDAQVDFSEFIVFVAAITSACHKYFEKAGLK

SEQ ID NO: 324 - protein, 380 aa, Homo sapiens
MLRRKPSNASEKEPTQKKKLSLQRSSSFKDFAKSKPSSPVVSEKEFNLDDNIPEDDSGVPTPEDAGKSGKKLGKKWRAVISRTMNRKMGKMMVKALSEEMADTLEEGSASPTSPDYSLDSPGPEKMALAFSEQEEHELPVLSRQASTGSELCSPSPGSGSFGEEPPAPQYTGPFCGRARVHTDFTPSPYDHDSLKLQKGDVIQIIEKPPVGTWLGLLNGKVGSFKFIYVDVLPEEAVGHARPSRRQSKGKRPKPKTLHELLERIGLEEHTSTLLLNGYQTLEDFKELRETHLNELNIMDPQHRAKLLTAAELLLDYDTGSEEAEEGAESSQEPVAHTVSEPKVDIPRDSGCFEGSESGRDDAELAGTEEQLQGLSLAGAP

SEQ ID NO: 325 - protein, 1893 aa, Homo sapiens
MARLADYFVLVAFGPHPRGSGEGQGQILQRFPEKDWEDNPFPQGIELFCQPSGWQLCPERNPPTFFVAVLTDINSERHYCACLTFWEPAEPSQETTRVEDATEREEEGDEGGQTHLSPTAPAPSAQLFAPKTLVLVSRLDHTEVFRNSLGLIYAIHVEGLNVCLENVIGNLLTCTVPLAGGSQRTISLGAGDRQVIQTPLADSLPVSRCSVALLFRQLGITNVLSLFCAALTEHKVLFLSRSYQRLADACRGLLALLFPLRYSFTYVPILPAQLLEVLSTPTPFIIGVNAAFQAETQELLDVIVADLDGGTVTIPECVHIPPLPEPLQSQTHSVLSMVLDPELELADLAFPPPTTSTSSLKMQDKELRAVFLRLFAQLLQGYRWCLHVVRIHPEPVIRFHKAAFLGQRGLVEDDFLMKVLEGMAFAGFVSERGVPYRPTDLFDELVAHEVARMRADENHPQRVLRHVQELAEQLYKNENPYPAVAMHKVQRPGESSHLRRVPRPFPRLDEGTVQWIVDQAAAKMQGAPPAVKAERRTTVPSGPPMTAILERCSGLHVNSARRLEVVRNCISYVFEGKMLEAKKLLPAVLRALKGRAARRCLAQELHLHVQQNRAVLDHQQFDFVVRMMNCCLQDCTSLDEHGIAAALLPLVTAFCRKLSPGVTQFAYSCVQEHVVWSTPQFWEAMFYGDVQTHIRALYLEPTEDLAPAQEVGEAPSQEDERSALDVASEQRRLWPTLSREKQQELVQKEESTVFSQAIHYANRMSYLLLPLDSSKSRLLRERAGLGDLESASNSLVTNSMAGSVAESYDTESGFEDAETCDVAGAVVRFINRFVDKVCTESGVTSDHLKGLHVMVPDIVQMHIETLEAVQRESRRLPPIQKPKLLRPRLLPGEECVLDGLRVYLLPDGREEGAGGSAGGPALLPAEGAVFLTTYRVIFTGMPTDPLVGEQVVVRSFPVAALTKEKRISVQTPVDQLLQDGLQLRSCTFQLLKMAFDEEVGSDSAELFRKQLHKLRYPPDIRATFAFTLGSAHTPGRPPRVTKDKGPSLRTLSRNLVKNAKKTIGRQHVTRKKYNPPSWEHRGQPPPEDQEDEISVSEELEPSTLTPSSALKPSDRMTMSSLVERACCRDYQRLGLGTLSSSLSRAKSEPFRISPVNRMYAICRSYPGLLIVPQSVQDNALQRVSRCYRQNRFPVVCWRSGRSKAVLLRSGGLHGKGVVGLFKAQNAPSPGQSQADSSSLEQEKYLQAVVSSMPRYADASGRNTLSGFSSAHMGSHVPSPRARVTTLSNPMAASASRRTAPRGKWGSVRTSGRSSGLGTDVGSRLAGRDALAPPQANGGPPDPGFLRPQRAALYILGDKAQLKGVRSDPLQQWELVPIEVFEARQVKASFKKLLKACVPGCPAAEPSPASFLRSLEDSEWLIQIHKLLQVSVLVVELLDSGSSVLVGLEDGWDITTQVVSLVQLLSDPFYRTLEGFRLLVEKEWLSFGHRFSHRGAHTLAGQSSGFTPVFLQFLDCVHQVHLQFPMEFEFSQFYLKFLGYHHVSRRFRTFLLDSDYERIELGLLYEEKGERRGQVPCRSVWEYVDRLSKRTPVFHNYMYAPEDAEVLRPYSNVSNLKVWDFYTEETLAEGPPYDWELAQGPPEPPEEERSDGGAPQSRRRVVWPCYDSCPRAQPDAISRLLEELQRLETELGQPAERWKDTWDRVKAAQRLEGRPDGRGTPSSLLVSTAPHHRRSLGVYLQEGPVGSTLSLSLDSDQSSGSTTSGSRQAARRSTSTLYSQFQTAESENRSYEGTLYKKGAFMKPWKARWFVLDKTKHQLRYYDHRVDTECKGVIDLAEVEAVAPGTPTMGAPKTVDEKAFFDVKTTRRVYNFCAQDVPSAQQWVDRIQSCLSDA

SEQ ID NO: 326 - protein, 221 aa, Homo sapiens
MWSAGRGGAAWPVLLGLLLALLVPGGGAAKTGAELVTCGSVLKLLNTHHRVRLHSHDIKYGSGSGQQSVTGVEASDDANSYWRIRGGSEGGCPRGSPVRCGQAVRLTHVLTGKNLHTHHFPSPLSNNQEVSAFGEDGEGDDLDLWTVRCSGQHWEREAAVRFQHVGTSVFLSVTGEQYGSPIRGQHEVHGMPSANTHNTWKAMEGIFIKPSVEPSAGHDEL

SEQ ID NO: 327 - protein, 169 aa, Homo sapiens
MAALLLRHVGRHCLRAHFSPQLCIRNAVPLGTTAKEEMERFWNKNIGSNRPLSPHITIYSWSLPMAMSICHRGTGIALSAGVSLFGMSALLLPGNFESYLELVKSLCLGPALIHTAKFALVFPLMYHTWNGIRHLMWDLGKGLKIPQLYQSGVVVLVLTVLSSMGLAAM

SEQ ID NO: 328 - protein, 314 aa, Homo sapiens
MLGKGGKRKFDEHEDGLEGKIVSPCDGPSKVSYTLQRQTIFNISLMKLYNHRPLTEPSLQKTVLINNMLRRIQEELKQEGSLRPMFTPSSQPTTEPSDSYREAPPAFSHLASPSSHPCDLGSTTPLEACLTPASLLEDDDDTFCTSQAMQPTAPTKLSPPALLPEKDSFSSALDEIEELCPTSTSTEAATAATDSVKGTSSEAGTQKLDGPQESRADDSKLMDSLPGNFEITTSTGFLTDLTLDDILFADIDTSMYDFDPCTSSSGTASKMAPVSADDLLKTLAPYSSQPVTPSQPFKMDLTELDHIMEVLVGS

SEQ ID NO: 329 - protein, 114 aa, Homo sapiens
MVIRVYIASSSGSTAIKKKQQDVLGFLEANKIGFEEKDIAANEENRKWMRENVPENSRPATGYPLPPQIFNESQYRGDYDAFFEARENNAVYAFLGLTAPPGSKEAEVQAKQQA

SEQ ID NO: 330 - protein, 395 aa, Homo sapiens
MDFNMKKLASDAGIFFTRAVQFTEEKFGQAEKTELDAHFENLLARADSTKNWTEKILRQTEVLLQPNPSARVEEFLYEKLDRKVPSRVTNGELLAQYMADAASELGPTTPYGKTLIKVAEAEKQLGAAERDFIHTASISFLTPLRNFLEGDWKTISKERRLLQNRRLDLDACKARLKKAKAAEAKATTVPDFQETRPRNYILSASASALWNDEVDKAEQELRVAQTEFDRQAEVTRLLLEGISSTHVNHLRCLHEFVKSQTTYYAQCYRHMLDLQKQLGRFPGTFVGTTEPASPPLSSTSPTTAAATMPVVPSVASLAPPGEASLCLEEVAPPASGTRKARVLYDYEAADSSELALLADELITVYSLPGMDPDWLIGERGNKKGKVPVTYLELLS

SEQ ID NO: 331 - protein, 335 aa, Homo sapiens
MAGSPTCLTLIYILWQLTGSAASGPVKELVGSVGGAVTFPLKSKVKQVDSIVWTFNTTPLVTIQPEGGTIIVTQNRNRERVDFPDGGYSLKLSKLKKNDSGIYYVGIYSSSLQQPSTQEYVLHVYEHLSKPKVTMGLQSNKNGTCVTNLTCCMEHGEEDVIYTWKALGQAANESHNGSILPISWRWGESDMTFICVARNPVSRNFSSPILARKLCEGAADDPDSSMVLLCLLLVPLLLSLFVLGLFLWFLKRERQEEYIEEKKRVDICRETPNICPHSGENTEYDTIPHTNRTILKEDPANTVYSTVEIPKKMENPHSLLTMPDTPRLFAYENVI

SEQ ID NO: 332 - protein, 561 aa, Homo sapiens
MVLGPEQKMSDDSVSGDHGESASLGNINPAYSNPSLSQSPGDSEEYFATYFNEKISIPEEEYSCFSFRKLWAFTGPGFLMSIAYLDPGNIESDLQSGAVAGFKLLWILLLATLVGLLLQRLAARLGVVTGLHLAEVCHRQYPKVPRVILWLMVELAIIGSDMQEVIGSAIAINLLSVGRIPLWGGVLITIADTFVFLFLDKYGLRKLEAFFGFLITIMALTFGYEYVTVKPSQSQVLKGMFVPSCSGCRTPQIEQAVGIVGAVIMPHNMYLHSALVKSRQVNRNNKQEVREANKYFFIESCIALFVSFIINVFVVSVFAEAFFGKTNEQVVEVCTNTSSPHAGLFPKDNSTLAVDIYKGGVVLGCYFGPAALYIWAVGILAAGQSSTMTGTYSGQFVMEGFLNLKWSRFARVVLTRSIAIIPTLLVAVFQDVEHLTGMNDFLNVLQSLQLPFALIPILTFTSLRPVMSDFANGLGWRIAGGILVLIICSINMYFVVVYVRDLGHVALYVVAAVVSVAYLGFVFYLGWQCLIALGMSFLDCGHTVSISKGLLTEEATRGYVK

SEQ ID NO: 333 - protein, 914 aa, Homo sapiens
MASESSPLLAYRLLGEEGVALPANGAGGPGGASARKLSTFLGVVVPTVLSMFSIVVFLRIGFVVGHAGLLQALAMLLVAYFILALTVLSVCAIATNGAVQGGGAYFMISRTLGPEVGGSIGLMFYLANVCGCAVSLLGLVESVLDVFGADATGPSGLRVLPQGYGWNLLYGSLLLGLVGGVCTLGAGLYARASFLTFLLVSGSLASVLISFVAVGPRDIRLTPRPGPNGSSLPPRFGHFTGFNSSTLKDNLGAGYAEDYTTGAVMNFASVFAVLFNGCTGIMAGANMSGELKDPSRAIPLGTIVAVAYTFFVYVLLFFLSSFTCDRTLLQEDYGFFRAISLWPPLVLIGIYATALSASMSSLIGASRILHALARDDLFGVILAPAKVVSRGGNPWAAVLYSWGLVQLVLLAGKLNTLAAVVTVFYLVAYAAVDLSCLSLEWASAPNFRPTFSLFSWHTCLLGVASCLLMMFLISPGAAGGSLLLMGLLAALLTARGGPSSWGYVSQALLFHQVRKYLLRLDVRKDHVKFWRPQLLLLVGNPRGALPLLRLANQLKKGGLYVLGHVTLGDLDSLPSDPVQPQYGAWLSLVDRAQVKAFVDLTLSPSVRQGAQHLLRISGLGGMKPNTLVLGFYDDAPPQDHFLTDPAFSEPADSTREGSSPALSTLFPPPRAPGSPRALNPQDYVATVADALKMNKNVVLARASGALPPERLSRGSGGTSQLHHVDVWPLNLLRPRGGPGYVDVCGLFLLQMATILGMVPAWHSARLRIFLCLGPREAPGAAEGRLRALLSQLRIRAEVQEVVWGEGAGAGEPEAEEEGDFVNSGRGDAEAEALARSANALVRAQQGRGTGGGPGGPEGGDAEGPITALTFLYLPRPPADPARYPRYLALLETLTRDLGPTLLVHGVTPVTCTDL

SEQ ID NO: 334 - protein, 338 aa, Homo sapiens
MELRSGSVGSQAVARRMDGDSRDGGGGKDATGSEDYENLPTSASVSTHMTAGAMAGILEHSVMYPVDSVKTRMQSLSPDPKAQYTSIYGALKKIMRTEGFWRPLRGVNVMIMGAGPAHAMYFACYENMKRTLNDVFHHQGNSHLANGIAGSMATLLHDAVMNPAEVVKQRLQMYNSQHRSAISCIRTVWRTEGLGAFYRSYTTQLTMNIPFQSIHFITYEFLQEQVNPHRTYNPQSHIISGGLAGALAAAATTPLDVCKTLLNTQENVALSLANISGRLSGMANAFRTVYQLNGLAGYFKGIQARVIYQMPSTAISWSVYEFFKYFLTKRQLENRAPY

SEQ ID NO: 335 - protein, 496 aa, Homo sapiens
MGTQKVTPALIFAITVATIGSFQFGYNTGVINAPEKIIKEFINKTLTDKGNAPPSEVLLTSLWSLSVAIFSVGGMIGSFSVGLFVNRFGRRNSMLIVNLLAVTGGCFMGLCKVAKSVEMLILGRLVIGLFCGLCTGFVPMYIGEISPTALRGAFGTLNQLGIVVGILVAQIFGLEFILGSEELWPLLLGFTILPAILQSAALPFCPESPRFLLINRKEEENAKQILQRLWGTQDVSQDIQEMKDESARMSQEKQVTVLELFRVSSYRQPIIISIVLQLSQQLSGINAVFYYSTGIFKDAGVQEPIYATIGAGVVNTIFTVVSLFLVERAGRRTLHMIGLGGMAFCSTLMTVSLLLKDNYNGMSFVCIGAILVFVAFFEIGPGPIPWFIVAELFSQGPRPAAMAVAGCSNWTSNFLVGLLFPSAAHYLGAYVFIIFTGFLITFLAFTFFKVPETRGRTFEDITRAFEGQAHGADRSGKDGVMEMNSIEPAKETTTNV

SEQ ID NO: 336 - protein, 460 aa, Homo sapiens
MAPGRAVAGLLLLAAAGLGGVAEGPGLAFSEDVLSVFGANLSLSAAQLQHLLEQMGAASRVGVPEPGQLHFNQCLTAEEIFSLHGFSNATQITSSKFSVICPAVLQQLNFHPCEDRPKHKTRPSHSEVWGYGFLSVTIINLASLLGLILTPLIKKSYFPKILTFFVGLAIGTLFSNAIFQLIPEAFGFDPKVDSYVEKAVAVFGGFYLLFFFERMLKMLLKTYGQNGHTHFGNDNFGPQEKTHQPKALPAINGVTCYANPAVTEANGHIHFDNVSVVSLQDGKKEPSSCTCLKGPKLSEIGTIAWMITLCDALHNFIDGLAIGASCTLSLLQGLSTSIAILCEEFPHELGDFVILLNAGMSTRQALLFNFLSACSCYVGLAFGILVGNNFAPNIIFALAGGMFLYISLADMFPEMNDMLREKVTGRKTDFTFFMIQNAGMLTGFTAILLITLYAGEIELE

SEQ ID NO: 337 - protein, 358 aa, Homo sapiens
MSADAAAGAPLPRLCCLEKGPNGYGFHLHGEKGKLGQYIRLVEPGSPAEKAGLLAGDRLVEVNGENVEKETHQQVVSRIRAALNAVRLLVVDPETDEQLQKLGVQVREELLRAQEAPGQAEPPAAAEVQGAGNENEPREADKSHPEQRELRPRLCTMKKGPSGYGFNLHSDKSKPGQFIRSVDPDSPAEASGLRAQDRIVEVNGVCMEGKQHGDVVSAIRAGGDETKLLVVDRETDEFFKKCRVIPSQEHLNGPLPVPFTNGEIQKENSREALAEAALESPRPALVRSASSDTSEELNSQDSPPKQDSTAPSSTSSSDPILDFNISLAMAKERAHQKRSSKRAPQMDWSKKNELFSNL

SEQ ID NO: 338 - protein, 368 aa, Homo sapiens
MGTPPGLQTDCEALLSRFQETDSVRFEDFTELWRNMKFGTIFCGRMRNLEKNMFTKEALALAWRYFLPPYTFQIRVGALYLLYGLYNTQLCQPKQKIRVALKDWDEVLKFQQDLVNAQHFDAAYIFRKLRLDRAFHFTAMPKLLSYRMKKKIHRAEVTEEFKDPSDRVMKLITSDVLEEMLNVHDHYQNMKHVISVDKSKPDKALSLIKDDFFDNIKNIVLEHQQWHKDRKNPSLKSKTNDGEEKMEGNSQETERCERAESLAKIKSKAFSVVIQASKSRRHRQVKLDSSDSDSASGQGQVKATRKKEKKERLKPAGRKMSLRNKGNVQNIHKEDKPLSLSMPVITEEEENESLSGTEFTASKKRRKH

SEQ ID NO: 339 - protein, 831 aa, Homo sapiens
MERPWGAADGLSRWPHGLGLLLLLQLLPPSTLSQDRLDAPPPPAAPLPRWSGPIGVSWGLRAAAAGGAFPRGGRWRRSAPGEDEECGRVRDFVAKLANNTHQHVFDDLRGSVSLSWVGDSTGVILVLTTFHVPLVIMTFGQSKLYRSEDYGKNFKDITDLINNTFIRTEFGMAIGPENSGKVVLTAEVSGGSRGGRIFRSSDFAKNFVQTDLPFHPLTQMMYSPQNSDYLLALSTENGLWVSKNFGGKWEEIHKAVCLAKWGSDNTIFFTTYANGSCKADLGALELWRTSDLGKSFKTIGVKIYSFGLGGRFLFASVMADKDTTRRIHVSTDQGDTWSMAQLPSVGQEQFYSILAANDDMVFMHVDEPGDTGFGTIFTSDDRGIVYSKSLDRHLYTTTGGETDFTNVTSLRGVYITSVLSEDNSIQTMITFDQGGRWTHLRKPENSECDATAKNKNECSLHIHASYSISQKLNVPMAPLSEPNAVGIVIAHGSVGDAISVMVPDVYISDDGGYSWTKMLEGPHYYTILDSGGIIVAIEHSSRPINVIKFSTDEGQCWQTYTFTRDPIYFTGLASEPGARSMNISIWGFTESFLTSQWVSYTIDFKDILERNCEEKDYTIWLAHSTDPEDYEDGCILGYKEQFLRLRKSSVCQNGRDYVVTKQPSICLCSLEDFLCDFGYYRPENDSKCVEQPELKGHDLEFCLYGREEHLTTNGYRKIPGDKCQGGVNPVREVKDLKKKCTSNFLSPEKQNSKSNSVPIILAIVGLMLVTVVAGVLIVKKYVCGGRFLVHRYSVLQQHAEANGVDGVDALDTASHTNKSGYHDDSDEDLLE

SEQ ID NO: 340 - protein, 361 aa, Homo sapiens
MYGKGKSNSSAVPSDSQAREKLALYVYEYLLHVGAQKSAQTFLSEIRWEKNITLGEPPGFLHSWWCVFWDLYCAAPERRETCEHSSEAKAFHDYSAAAAPSPVLGNIPPGDGMPVGPVPPGFFQPFMSPRYPGGPRPPLRIPNQALGGVPGSQPLLPSGMDPTRQQGHPNMGGPMQRMTPPRGMVPLGPQNYGGAMRPPLNALGGPGMPGMNMGPGGGRPWPNPTNANSIPYSSASPGNYVGPPGGGGPPGTPIMPSPADSTNSGDNMYTLMNAVPPGPNRPNFPMGPGSDGPMGGLGGMESHHMNGSLGSGDMDSISKNSPNNMSLSNQPGTPRDDGEMGGNFLNPFQSESYSPSMTMSV

SEQ ID NO: 341 - protein, 418 aa, Homo sapiens
MRTKAAGCAERRPLQPRTEAAAAPAGRAMPSEYTYVKLRSDCSRPSLQWYTRAQSKMRRPSLLLKDILKCTLLVFGVWILYILKLNYTTEECDMKKMHYVDPDHVKRAQKYAQQVLQKECRPKFAKTSMALLFEHRYSVDLLPFVQKAPKDSEAESKYDPPFGFRKFSSKVQTLLELLPEHDLPEHLKAKTCRRCVVIGSGGILHGLELGHTLNQFDVVIRLNSAPVEGYSEHVGNKTTIRMTYPEGAPLSDLEYYSNDLFVAVLFKSVDFNWLQAMVKKETLPFWVRLFFWKQVAEKIPLQPKHFRILNPVIIKETAFDILQYSEPQSRFWGRDKNVPTIGVIAVVLATHLCDEVSLAGFGYDLNQPRTPLHYFDSQCMAAMNFQTMHNVTTETKFLLKLVKEGVVKDLSGGIDREF

SEQ ID NO: 342 - protein, 331 aa, Homo sapiens
MRGYLVAIFLSAVFLYYVLHCILWGTNVYWVAPVEMKRRNKIQPCLSKPAFASLLRFHQFHPFLCAADFRKIASLYGSDKFDLPYGMRTSAEYFRLALSKLQSCDLFDEFDNIPCKKCVVVGNGGVLKNKTLGEKIDSYDVIIRMNNGPVLGHEEEVGRRTTFRLFYPESVFSDPIHNDPNTTVILTAFKPHDLRWLLELLMGDKINTNGFWKKPALNLIYKPYQIRILDPFIIRTAAYELLHFPKVFPKNQKPKHPTTGIIAITLAFYICHEVHLAGFKYNFSDLKSPLHYYGNATMSLMNKNAYHNVTAEQLFLKDIIEKNLVINLTQD

SEQ ID NO: 343 - protein, 465 aa, Homo sapiens
MAMTGSTPCSSMSNHTKERVTMTKVTLENFYSNLIAQHEEREMRQKKLEKVMEEEGLKDEEKRLRRSAHARKETEFLRLKRTRLGLEDFESLKVIGRGAFGEVRLVQKKDTGHVYAMKILRKADMLEKEQVGHIRAERDILVEADSLWVVKMFYSFQDKLNLYLIMEFLPGGDMMTLLMKKDTLTEEETQFYIAETVLAIDSIHQLGFIHRDIKPDNLLLDSKGHVKLSDFGLCTGLKKAHRTEFYRNLNHSLPSDFTFQNMNSKRKAETWKRNRRQLAFSTVGTPDYIAPEVFMQTGYNKLCDWWSLGVIMYEMLIGYPPFCSETPQETYKKVMNWKETLTFPPEVPISEKAKDLILRFCCEWEHRIGAPGVEEIKSNSFFEGVDWEHIRERPAAISIEIKSIDDTSNFDEFPESDILKPTVATSNHPETDYKNKDWVFINYTYKRFEGLTARGAIPSYMKAAK

SEQ ID NO: 344 - protein, 6885 aa, Homo sapiens
MASSPELPTEDEQGSWGIDDLHISLQAEQEDTQKKAFTCWINSQLARHTSPSVISDLFTDIKKGHVLLDLLEVLSGQQLPRDKGSNTFQCRINIEHALTFLRNRSIKLINIHVTDIIDGNPSIILGLIWTIILHFHIEKLAQTLSCNYNQPSLDDVSVVDSSPASSPPAKKCSKVQARWQMSARKALLLWAQEQCATYESVNVTDFKSSWRNGMAFLAIIHALRPDLIDMKSVKHRSNKDNLREAFRIAEQELKIPRLLEPEDVDVVDPDEKSIMTYVAQFLQYSKDAPGTGEEAQGKVKDAMGWLTLQKEKLQKLLKDSENDTYFKKYNSLLSFMESFNEEKKSFLDVLSIKRDLDELDKDHLQLREAWDGLDHQINAWKIKLNYALPPPLHQTEAWLQEVEELMDEDLSASQDHSQAVTLIQEKMTLFKSLMDRFEHHSNILLTFENKDENHLPLVPPNKLEEMKRRINNILEKKFILLLEFHYYKCLVLGLVDEVKSKLDIWNIKYGSRESVELLLEDWHKFIEEKEFLARLDTSFQKCGEIYKNLAGECQNINKQYMMVKSDVCMYRKNIYNVKSTLQKVLACWATYVENLRLLRACFEETKKEEIKEVPFETLAQWNLEHATLNEAGNFLVEVSNDVVGSSISKELRRLNKRWRKLVSKTQLEMNLPLMIKKQDQPTFDNSGNILSKEEKATVEFSTDMSVELPENYNQNIKAGEKHEKENEEFTGQLKVAKDVEKLIGQVEIWEAEAKSVLDQDDVDTSMEESLKHLIAKGSMFDELMARSEDMLQMDIQNISSQESFQHVLTTGLQAKIQEAKEKVQINVVKLIAALKNLTDVSPDLDIRLKMEESQKELESYMMRAQQLLGQRESPGELISKHKEALIISNTKSLAKYLKAVEELKNNVTEDIKMSLEEKSRDVCAKWESLHHELSLYVQQLKIDIEKGKLSDNILKLEKQINKEKKLIRRGRTKGLIKEHEACFSEEGCLYQLNHHMEVLRELCEELPSQKSQQEVKRLLKDYEQKIERLLKCASEIHMTLQPTAGGTSKNEGTITTSENRGGDPHSEAPFAKSDNQPSTEKAMEPTMKFSLASVLRPLQEESIMEKDYSASINSLLERYDTYRDILEHHLQNNKFRITSDFSSEEDRSSSCLQAKLTDLQVIKNETDARWKEFEIISLKLENHVNDIKKPFVIKERDTLKERERELQMTLNTRMESLETALRLVLPVEKASLLLCGSDLPLHKMAIQGFHLIDADRIYQHLRNIQDSIAKQIEICNRLEEPGNFVLKELHPFDLHAMQNIILKYKTQFEGMNHRVQRSEDTLKALEDFLASLRTAKLSAEPVTDLSASDTQVAQENTLTVKNKEGEIHLMKDKAKHLDKCLKMLDMSFKDAERGDDTSCENLLDAFSIKLSETHGYGVQEEFTEENKLLEACIFKNNELLKNIQDVQSQISKIGLKDPTVPAVKHRKKSLIRLDKVLDEYEEEKRHLQEMANSLPHFKDGREKTVNQQCQNTVVLWENTKALVTECLEQCGRVLELLKQYQNFKSILTTLIQKEESVISLQASYMGKENLKKRIAEIEIVKEEFNEHLEVVDKINQVCKNLQFYLNKMKTFEEPPFEKEANIIVDRWLDINEKTEDYYENLGRALALWDKLFNLKNVIDEWTEKALQKMELHQLTEEDRERLKEELQVHEQKTSEFSRRVAEIQFLLQSSEIPLELQVMESSILNKMEHVQKCLTGESNCHALSGSTAELREDLDQAKTQIGMTESLLKALSPSDSLEIFTKLEEIQQQILQQKHSMILLENQIGCLTPELSELKKQYESVSDLFNTKKSVLQDHFSKLLNDQCKNFNDWFSNIKVNLKECFESSETKKSVEQKLQKLSDFLTLEGRNSKIKQVDSVLKHVKKHLPKAHVKELISWLVGQEFELEKMESICQARAKELEDSLQQLLRLQDDHRNLRKWLTNQEEKWKGMEEPGEKTELFCQALARKREQFESVAQLNNSLKEYGFTEEEEIIMEATCLMDRYQTLLRQLSEIEEEDKLLPTEDQSFNDLAHDVIHWIKEIKESLMVLNSSEGKMPLEERIQKIKEIILLKPEGDARIETIMKQAESSEAPLVQKTLTDISNQWDNTLHLASTYLSHQEKLLLEGEKYLQSKEDLRLMLIELKKKQEAGFALQHGLQEKKAQLKIYKKFLKKAQDLTSLLKELKSQGNYLLECTKNPSFSEEPWLEIKHLHESLLQQLQDSVQNLDGHVREHDSYQVCVTDLNTTLDNFSKEFVSFSDKPVDQIAVEEKLQKLQELENRLSLQDGTLKKILALAKSVKQNTSSVGQKIIKDDIKSLQCKQKDLENRLASAKQEMECCLNSILKSKRSTEKKGKFTLPGREKQATSDVQESTQESAAVEKLEEDWEINKDSAVEMAMSKQLSLNAQESMKNTEDERKVNELQNQPLELDTMLRNEQLEEIEKLYTQLEAKKAAIKPLEQTECLNKTETGALVLHNIGYSAQHLDNLLQALITLKKNKESQYCVLRDFQEYLAAVESSMKALLTDKESLKVGPLDSVTYLDKIKKFIASIEKEKDSLGNLKIKWENLSNHVTDMDKKLLESQIKQLEHGWEQVEQQIQKKYSQQVVEYDEFTTLMNKVQDTEISLQQQQQHLQLRLKSPEERAGNQSMIALTTDLQATKHGFSVLKGQAELQMKRIWGEKEKKNLEDGINNLKKQWETLEPLHLEAENQIKKCDIRNKMKETILWAKNLLGELNPSIPLLPDDILSQIRKCKVTHDGILARQQSVESLAEEVKDKVPSLTTYEGSDLNNTLEDLRNQYQMLVLKSTQRSQQLEFKLEERSNFFAIIRKFQLMVQESETLIIPRVETAATEAELKHHHVTLEASQKELQEIDSGISTHLQELTNIYEELNVFERLFLEDQLKNLKIRTNRIQRFIQNTCNEVEHKIKFCRQFHEKTSALQEEADSIQRNELLLNQEVNKGVKEEIYNLKDRLTAIKCCILQVLKLKKVFDYIGLNWDFSQLDQLQTQVFEKEKELEEKIKQLDTFEEEHGKYQALLSKMRAIDLQIKKMTEVVLKAPDSSPESRRLNAQILSQRIEKAKCLCDEIIKKLNENKTFDDSFKEKEILQIKLNAEENDKLYKVLQNMVLELSPKELDEKNCQDKLETSLHVLNQIKSQLQQPLLINLEIKHIQNEKDNCEAFQEQVWAEMCSIKAVTAIEKQREENSSEASDVETKLREFEDLQMQLNTSIDLRTNVLNDAYENLTRYKEAVTRAVESITSLEAIIIPYRVDVGNPEESLEMPLRKQEELESTVAHIQDLTEKLGMISSPEAKLQLQYTLQELVSKNSAMKEAFKAQETEAERYLENYKCYRKMEEDIYTNLSKMETVLGQSMSSLPLSYREALERLEQSKALVSNLISTKEELMKLRQILRLLRLRCTENDGICLLKIVSALWEKWLSLLEAAKEWEMWCEELKQEWKFVSEEIEREAIILDNLQEELPEISKTKEAATTEELSELLDCLCQYGENVEKQQLLLTLLLQRIRSIQNVPESSGAVETVPAFQEITSMKERCNKLLQKVQKNKELVQTEIQERHSFTKEIIALKNFFQQTTTSFQNMAFQDHPEKSEQFEELQSILKKGKLTFENIMEKLRIKYSEMYTIVPAEIESQVEECRKALEDIDEKISNEVLKSSPSYAMRRKIEEINNGLHNVEKMLQQKSKNIEKAQEIQKKMWDELDLWHSKLNELDSEVQDIVEQDPGQAQEWMDNLMIPFQQYQQVSQRAECRTSQLNKATVKMEEYSDLLKSTEAWIENTSHLLANPADYDSLRTLSHHASTVQMALEDSEQKHNLLHSIFMDLEDLSIIFETDELTQSIQELSNQVTALQQKIMESLPQIQRMADDVVAIESEVKSMEKRVSKIKTILLSKEIFDFSPEEHLKHGEVILENIRPMKKTIAEIVSYQVELRLPQTGMKPLPVFQRTNQLLQDIKLLENVTQEQNELLKVVIKQTNEWDEEIENLKQILNNYSAQFSLEHMSPDQADKLPQLQGEIERMEKQILSLNQRKEDLLVDLKATVLNLHQHLKQEQEGVERDRLPAVTSEEGGVAERDASERKLNRRGSMSYLAAVEEEVEESSVKSDNGDEKAEPSPQSWSSLWKHDKDMEEDRASSSSGTIVQEAYGKISTSDNSMAQILTPDSLNTEQGPECSLRPNQTEEGTTPPIEADTLDSSDAQGGLEPRVEKTRPEPTEVLHACKTQVAELELWLQQANVAVEPETLNADMQQVLEQQLVGCQAMLTEIEHKVAFLLETCKDQGLGDNGATQHEAEALSLKLKTVKCNLEKVQMMLQEKHSEDQHPTILKKSSEPEHQEALQPVNLSELESIVTERPQFSRQKDFQQQQVLELKPMEQKDFIKFIEFNAKKMWPQYCQHDNDTTQESSASNQASSPENDVPDSILSPQGQNGDKWQYLHHELSSKIKLPLPQLVEPQVSTNMGILPSVTMYNFRYPTTEELKTYTTQLEDLRQEASNLQTQENMTEEAYINLDKKLFELFLTLSQCLSSVEEMLEMPRLYREDGSGQQVHYETLALELKKLYLALSDKKGDLLKAMTWPGENTNLLLECFDNLQVCLEHTQAAAVCRSKSLKAGLDYNRSYQNEIKRLYHQLIKSKTSLQQSLNEISGQSVAEQLQKADAYTVELENAESRVAKLRDEGERLHLPYALLQEVYKLEDVLDSMWGMLRARYTELSSPFVTESQQDALLQGMVELVKIGKEKLAHGHLKQTKSKVALQAQIENHKVFFQKLVADMLLIQAYSAKILPSLLQNRETFWAEQVTEVKILEEKSRQCGMKLQSLLQKWEEFDENYASLEKDLEILISTLPSVSLVEETEERLVERISFYQQIKRNIGGKHARLYQTLNEGKQLVASVSCPELEGQIAKLEEQWLSLNKKIDHELHRLQALLKHLLSYNRDSDQLTKWLESSQHTLNYWKEQSLNVSQDLDTIRSNINNFFEFSKEVDEKSSLKTAVISIGNQLLHLKETDTATLRASLAQFEQKWTMLITQLPDIQEKLHQLQMEKLPSRKAITEMISWMNNVEHQTSDEDSVHSPSSASQVKHLLQKHKEFRMEMDYKQWIVDFVNQSLLQLSTCDVESKRYERTEFAEHLGEMNRQWHRVHGMLNRKIQHLEQLLESITESENKIQILNNWLEAQEERLKTLQKPESVISVQKLLLDCQDIENQLAIKSKALDELKQSYLTLESGAVPLLEDTASRIDELFQKRSSVLTQVNQLKTSMQSVLQEWKIYDQLYDEVNMMTIRFWYCMEHSKPVVLSLETLRCQVENLQSLQDEAESSEGSWEKLQEVIGKLKGLCPSVAEIIEEKCQNTHKRWTQVNQAIADQLQKAQSLLQLWKAYSNAHGEAAARLKQQEAKFQQLANISMSGNNLAEILPPALQDIKELQHDVQKTKEAFLQNSSVLDRLPQPAESSTHMLLPGPLHSLQRAAYLEKMLLVKANEFEFVLSQFKDFGVRLESLKGLIMHEEENLDRLHQQEKENPDSFLNHVLALTAQSPDIEHLNEVSLKLPLSDVAVKTLQNMNRQWIRATATALERCSELQGIGLNEKFLYCCEKWIQLLEKIEEALKVDVANSLPELLEQQKTYKMLEAEVSINQTIADSYVTQSLQLLDTTEIENRPEFITEFSKLTDRWQNAVQGVRQRKGDVDGLVRQWQDFTTSVENLFRFLTDTSHLLSAVKGQERFSLYQTRSLIHELKNKEIHFQRRRTTCALTLEAGEKLLLTTDLKTKESVGRRISQLQDSWKDMEPQLAEMIKQFQSTVETWDQCEKKIKELKSRLQVLKAQSEDPLPELHEDLHNEKELIKELEQSLASWTQNLKELQTMKADLTRHVLVEDVMVLKEQIEHLHRQWEDLCLRVAIRKQEIEDRLNTWVVFNEKNKELCAWLVQMENKVLQTADISIEEMIEKLQKDCMEEINLFSENKLQLKQMGDQLIKASNKSRAAEIDDKLNKINDRWQHLFDVIGSRVKKLKETFAFIQQLDKNMSNLRTWLARIESELSKPVVYDVCDDQEIQKRLAEQQDLQRDIEQHSAGVESVFNICDVLLHDSDACANETECDSIQQTTRSLDRRWRNICAMSMERRMKIEETWRLWQKFLDDYSRFEDWLKSAERTAACPNSSEVLYTSAKEELKRFEAFQRQIHERLTQLELINKQYRRLARENRTDTASRLKQMVHEGNQRWDNLQRRVTAVLRRLRHFTNQREEFEGTRESILVWLTEMDLQLTNVEHFSESDADDKMRQLNGFQQEITLNTNKIDQLIVFGEQLIQKSEPLDAVLIEDELEELHRYCQEVFGRVSRFHRRLTSCTPGLEDEKEASENETDMEDPREIQTDSWRKRGESEEPSSPQSLCHLVAPGHERSGCETPVSVDSIPLEWDHTGDVGGSSSHEEDEEGPYYSALSGKSISDGHSWHVPDSPSCPEHHYKQMEGDRNVPPVPPASSTPYKPPYGKLLLPPGTDGGKEGPRVLNGNPQQEDGGLAGITEQQSGAFDRWEMIQAQELHNKLKIKQNLQQLNSDISAITTWLKKTEAELEMLKMAKPPSDIQEIELRVKRLQEILKAFDTYKALVVSVNVSSKEFLQTESPESTELQSRLRQLSLLWEAAQGAVDSWRGGLRQSLMQCQDFHQLSQNLLLWLASAKNRRQKAHVTDPKADPRALLECRRELMQLEKELVERQPQVDMLQEISNSLLIKGHGEDCIEAEEKVHVIEKKLKQLREQVSQDLMALQGTQNPASPLPSFDEVDSGDQPPATSVPAPRAKQFRAVRTTEGEEETESRVPGSTRPQRSFLSRVVRAALPLQLLLLLLLLLACLLPSSEEDYSCTQANNFARSFYPMLRYTNGPPPT

SEQ ID NO: 345 - protein, 789 aa, Homo sapiens
MTSFQEVPLQTSNFAHVIFQNVAKSYLPNAHLECHYTLTPYIHPHPKDWVGIFKVGWSTARDYYTFLWSPMPEHYVEGSTVNCVLAFQGYYLPNDDGEFYQFCYVTHKGEIRGASTPFQFRASSPVEELLTMEDEGNSDMLVVTTKAGLLELKIEKTMKEKEELLKLIAVLEKETAQLREQVGRMERELNHEKERCDQLQAEQKGLTEVTQSLKMENEEFKKRFSDATSKAHQLEEDIVSVTHKAIEKETELDSLKDKLKKAQHEREQLECQLKTEKDEKELYKVHLKNTEIENTKLMSEVQTLKNLDGNKESVITHFKEEIGRLQLCLAEKENLQRTFLLTTSSKEDTCFLKEQLRKAEEQVQATRQEVVFLAKELSDAVNVRDRTMADLHTARLENEKVKKQLADAVAELKLNAMKKDQDKTDTLEHELRREVEDLKLRLQMAADHYKEKFKECQRLQKQINKLSDQSANNNNVFTKKTGNQQKVNDASVNTDPATSASTVDVKPSPSAAEADFDIVTKGQVCEMTKEIADKTEKYNKCKQLLQDEKAKCNKYADELAKMELKWKEQVKIAENVKLELAEVQDNYKELKRSLENPAERKMEGQNSQSPQCFKTCSEQNGYVLTLSNAQPVLQYGNPYASQETRDGADGAFYPDEIQRPPVRVPSWGLEDNVVCSQPARNFSRPDGLEDSEDSKEDENVPTAPDPPSQHLRGHGTGFCFDSSFDVHKKCPLCELMFPPNYDQSKFEEHVESHWKVCPMCSEQFPPDYDQQVFERHVQTHFDQNVLNFD

SEQ ID NO: 346 - protein, 207 aa, Homo sapiens
MAPFEPLASGILLLLWLIAPSRACTCVPPHPQTAFCNSDLVIRAKFVGTPEVNQTTLYQRYEIKMTKMYKGFQALGDAADIRFVYTPAMESVCGYFHRSHNRSEEFLIAGKLQDGLLHITTCSFVAPWNSLSLAQRRGFTKTYTVGCEECTVFPCLSIPCKLQSGTHCLWTDQLLQGSEKGFQSRHLACLPREPGLCTWQSLRSQIA

SEQ ID NO: 347 - protein, 354 aa, Homo sapiens
MATPLVAGPAALRFAAAASWQVVRGRCVEHFPRVLEFLRSLRAVAPGLVRYRHHERLCMGLKAKVVVELILQGRPWAQVLKALNHHFPESGPIVRDPKATKQDLRKILEAQETFYQQVKQLSEAPVDLASKLQELEQEYGEPFLAAMEKLLFEYLCQLEKALPTPQAQQLQDVLSWMQPGVSITSSLAWRQYGVDMGWLLPECSVTDSVNLAEPMEQNPPQQQRLALHNPLPKAKPGTHLPQGPSSRTHPEPLAGRHFNLAPLGRRRVQSQWASTRGGHKERPTVMLFPFRNLGSPTQVISKPESKEEHAIYTADLAMGTRAASTGKSKSPCQTLGGRALKENPVDLPATEQKE

SEQ ID NO: 348 - protein, 858 aa, Homo sapiens
MGDHLDLLLGVVLMAGPVFGIPSCSFDGRIAFYRFCNLTQVPQVLNTTERLLLSFNYIRTVTASSFPFLEQLQLLELGSQYTPLTIDKEAFRNLPNLRILDLGSSKIYFLHPDAFQGLFHLFELRLYFCGLSDAVLKDGYFRNLKALTRLDLSKNQIRSLYLHPSFGKLNSLKSIDFSSNQIFLVCEHELEPLQGKTLSFFSLAANSLYSRVSVDWGKCMNPFRNMVLEILDVSGNGWTVDITGNFSNAISKSQAFSLILAHHIMGAGFGFHNIKDPDQNTFAGLARSSVRHLDLSHGFVFSLNSRVFETLKDLKVLNLAYNKINKIADEAFYGLDNLQVLNLSYNLLGELYSSNFYGLPKVAYIDLQKNHIAIIQDQTFKFLEKLQTLDLRDNALTTIHFIPSIPDIFLSGNKLVTLPKINLTANLIHLSENRLENLDILYFLLRVPHLQILILNQNRFSSCSGDQTPSENPSLEQLFLGENMLQLAWETELCWDVFEGLSHLQVLYLNHNYLNSLPPGVFSHLTALRGLSLNSNRLTVLSHNDLPANLEILDISRNQLLAPNPDVFVSLSVLDITHNKFICECELSTFINWLNHTNVTIAGPPADIYCVYPDSFSGVSLFSLSTEGCDEEEVLKSLKFSLFIVCTVTLTLFLMTILTVTKFRGFCFICYKTAQRLVFKDHPQGTEPDMYKYDAYLCFSSKDFTWVQNALLKHLDTQYSDQNRFNLCFEERDFVPGENRIANIQDAIWNSRKIVCLVSRHFLRDGWCLEAFSYAQGRCLSDLNSALIMVVVGSLSQYQLMKHQSIRGFVQKQQYLRWPEDLQDVGWFLHKLSQQILKKEKEKKKDNNIPLQTVATIS

SEQ ID NO: 349 - protein, 250 aa, Homo sapiens
MGSQHSAAARPSSCRRKQEDDRDGLLAEREQEEAIAQFPYVEFTGRDSITCLTCQGTGYIPTEQVNELVALIPHSDQRLRPQRTKQYVLLSILLCLLASGLVVFFLFPHSVLVDDDGIKVVKVTFNKQDSLVILTIMATLKIRNSNFYTVAVTSLSSQIQYMNTVVSTYVTTNVSLIPPRSEQLVNFTGKAEMGGPFSYVYFFCTVPEILVHNIVIFMRTSVKISYIGLMTQSSLETHHYVDCGGNSTAI

SEQ ID NO: 350 - protein, 216 aa, Homo sapiens
MLPNVGSPPLPFRKCPSGAGRTNRASAVARTSAPETRRGRAPSSGDAKMAEGARARGPRGCRDRDGPAGGAGKMAAPRRGRGSSTVLSSVPLQMLFYLSGTYYALYFLATLLMITYKSQVFSYPHRYLVLDLALLFLMGILEAVRLYLGTRGNLTEAERPLAASLALTAGTALLSAHFLLWQALVLWADWALSATLLALHGLEAVLQVVAIAAFTR

SEQ ID NO: 351 - protein, 345 aa, Homo sapiens
MQLEIQVALNFIISYLYNKLPRRRVNIFGEELERLLKKKYEGHWYPEKPYKGSGFRCIHIGEKVDPVIEQASKESGLDIDDVRGNLPQDLSVWIDPFEVSYQIGEKGPVKVLYVDDNNENGCELDKEIKNSFNPEAQVFMPISDPASSVSSSPSPPFGHSAAVSPTFMPRSTQPLTFTTATFAATKFGSTKMKNSGRSNKVARTSPINLGLNVNDLLKQKAISSSMHSLYGLGLGSQQQPQQQQQPAQPPPPPPPPQQQQQQKTSALSPNAKEFIFPNMQGQGSSTNGMFPGDSPLNLSPLQYSNAFDVFAAYGGLNEKSFVDGLNFSLNNMQYSNQQFQPVMAN

SEQ ID NO: 352 - protein, 1249 aa, Homo sapiens
MATAATEEPFPFHGLLPKKETGAASFLCRYPEYDGRGVLIAVLDTGVDPGAPGMQVTTDGKPKIVDIIDTTGSGDVNTATEVEPKDGEIVGLSGRVLKIPASWTNPSGKYHIGIKNGYDFYPKALKERIQKERKEKIWDPVHRVALAEACRKQEEFDVANNGSSQANKLIKEELQSQVELLNSFEKKYSDPGPVYDCLVWHDGEVWRACIDSNEDGDLSKSTVLRNYKEAQEYGSFGTAEMLNYSVNIYDDGNLLSIVTSGGAHGTHVASIAAGHFPEEPERNGVAPGAQILSIKIGDTRLSTMETGTGLIRAMIEVINHKCDLVNYSYGEATHWPNSGRICEVINEAVWKHNIIYVSSAGNNGPCLSTVGCPGGTTSSVIGVGAYVSPDMMVAEYSLREKLPANQYTWSSRGPSADGALGVSISAPGGAIASVPNWTLRGTQLMNGTSMSSPNACGGIALILSGLKANNIDYTVHSVRRALENTAVKADNIEVFAQGHGIIQVDKAYDYLVQNTSFANKLGFTVTVGNNRGIYLRDPVQVAAPSDHGVGIEPVFPENTENSEKISLQLHLALTSNSSWVQCPSHLELMNQCRHINIRVDPRGLREGLHYTEVCGYDIASPNAGPLFRVPITAVIAAKVNESSHYDLAFTDVHFKPGQIRRHFIEVPEGATWAEVTVCSCSSEVSAKFVLHAVQLVKQRAYRSHEFYKFCSLPEKGTLTEAFPVLGGKAIEFCIARWWASLSDVNIDYTISFHGIVCTAPQLNIHASEGINRFDVQSSLKYEDLAPCITLKNWVQTLRPVSAKTKPLGSRDVLPNNRQLYEMVLTYNFHQPKSGEVTPSCPLLCELLYESEFDSQLWIIFDQNKRQMGSGDAYPHQYSLKLEKGDYTIRLQIRHEQISDLERLKDLPFIVSHRLSNTLSLDIHENHSFALLGKKKSSNLTLPPKYNQPFFVTSLPDDKIPKGAGPGCYLAGSLTLSKTELGKKADVIPVHYYLIPPPTKTKNGSKDKEKDSEKEKDLKEEFTEALRDLKIQWMTKLDSSDIYNELKETYPNYLPLYVARLHQLDAEKERMKRLNEIVDAANAVISHIDQTALAVYIAMKTDPRPDAATIKNDMDKQKSTLVDALCRKGCALADHLLHTQAQDGAISTDAEGKEEEGESPLDSLAETFWETTKWTDLFDNKVLTFAYKHALVNKMYGRGLKFATKLVEEKPTKENWKNCIQLMKLLGWTHCASFTENWLPIMYPPDYCVF

SEQ ID NO: 353 - protein, 574 aa, Homo sapiens
MPPQLQETRMNRSIPVEVDESEPYPSQLLKPIPEYSPEEESEPPAPNIRNMAPNSLSAPTMLHNSSGDFSQAHSTLKLANHQRPVSRQVTCLRTQVLEDSEDSFCRRHPGLGKAFPSGCSAVSEPASESVVGALPAEHQFSFMEKRNQWLVSQLSAASPDTGHDSDKSDQSLPNASADSLGGSQEMVQRPQPHRNRAGLDLPTIDTGYDSQPQDVLGIRQLERPLPLTSVCYPQDLPRPLRSREFPQFEPQRYPACAQMLPPNLSPHAPWNYHYHCPGSPDHQVPYGHDYPRAAYQQVIQPALPGQPLPGASVRGLHPVQKVILNYPSPWDHEERPAQRDCSFPGLPRHQDQPHHQPPNRAGAPGESLECPAELRPQVPQPPSPAAVPRPPSNPPARGTLKTSNLPEELRKVFITYSMDTAMEVVKFVNFLLVNGFQTAIDIFEDRIRGIDIIKWMERYLRDKTVMIIVAISPKYKQDVEGAESQLDEDEHGLHTKYIHRMMQIEFIKQGSMNFRFIPVLFPNAKKEHVPTWLQNTHVYSWPKNKKNILLRLLREEEYVAPPRGPLPTLQVVPL

SEQ ID NO: 354 - protein, 520 aa, Homo sapiens
MECPHLSSSVCIAPDSAKFPNGSPSSWCCSVCRSNKSPWVCLTCSSVHCGRYVNGHAKKHYEDAQVPLTNHKKSEKQDKVQHTVCMDCSSYSTYCYRCDDFVVNDTKLGLVQKVREHLQNLENSAFTADRHKKRKLLENSTLNSKLLKVNGSTTAICATGLRNLGNTCFMNAILQSLSNIEQFCCYFKELPAVELRNGKTAGRRTYHTRSQGDNNVSLVEEFRKTLCALWQGSQTAFSPESLFYVVWKIMPNFRGYQQQDAHEFMRYLLDHLHLELQGGFNGVSRSAILQENSTLSASNKCCINGASTVVTAIFGGILQNEVNCLICGTESRKFDPFLDLSLDIPSQFRSKRSKNQENGPVCSLRDCLRSFTDLEELDETELYMCHKCKKKQKSTKKFWIQKLPKVLCLHLKRFHWTAYLRNKVDTYVEFPLRGLDMKCYLLEPENSGPESCLYDLAAVVVHHGSGVGSGHYTAYATHEGRWFHFNDSTVTLTDEETVVKAKAYILFYVEHQAKAGSDKL

SEQ ID NO: 355 - protein, 845 aa, Homo sapiens
MELWRQCTHWLIQCRVLPPSHRVTWDGAQVCELAQALRDGVLLCQLLNNLLPHAINLREVNLRPQMSQFLCLKNIRTFLSTCCEKFGLKRSELFEAFDLFDVQDFGKVIYTLSALSWTPIAQNRGIMPFPTEEESVGDEDIYSGLSDQIDDTVEEDEDLYDCVENEEAEGDEIYEDLMRSEPVSMPPKMTEYDKRCCCLREIQQTEEKYTDTLGSIQQHFLKPLQRFLKPQDIEIIFINIEDLLRVHTHFLKEMKEALGTPGAANLYQVFIKYKERFLVYGRYCSQVESASKHLDRVAAAREDVQMKLEECSQRANNGRFTLRDLLMVPMQRVLKYHLLLQELVKHTQEAMEKENLRLALDAMRDLAQCVNEVKRDNETLRQITNFQLSIENLDQSLAHYGRPKIDGELKITSVERRSKMDRYAFLLDKALLICKRRGDSYDLKDFVNLHSFQVRDDSSGDRDNKKWSHMFLLIEDQGAQGYELFFKTRELKKKWMEQFEMAISNIYPENATANGHDFQMFSFEETTSCKACQMLLRGTFYQGYRCHRCRASAHKECLGRVPPCGRHGQDFPGTMKKDKLHRRAQDKKRNELGLPKMEVFQEYYGLPPPPGAIGPFLRLNPGDIVELTKAEAEQNWWEGRNTSTNEIGWFPCNRVKPYVHGPPQDLSVHLWYAGPMERAGAESILANRSDGTFLVRQRVKDAAEFAISIKYNVEVKHIKIMTAEGLYRITEKKAFRGLTELVEFYQQNSLKDCFKSLDTTLQFPFKEPEKRTISRPAVGSTKYFGTAKARYDFCARDRSELSLKEGDIIKILNKKGQQGWWRGEIYGRVGWFPANYVEEDYSEYC

SEQ ID NO: 356 - protein, 1336 aa, Homo sapiens
MATEIGSPPRFFHMPRFQHQAPRQLFYKRPDFAQQQAMQQLTFDGKRMRKAVNRKTIDYNPSVIKYLENRIWQRDQRDMRAIQPDAGYYNDLVPPIGMLNNPMNAVTTKFVRTSTNKVKCPVFVVRWTPEGRRLVTGASSGEFTLWNGLTFNFETILQAHDSPVRAMTWSHNDMWMLTADHGGYVKYWQSNMNNVKMFQAHKEAIREASFSPTDNKFATCSDDGTVRIWDFLRCHEERILRGHGADVKCVDWHPTKGLVVSGSKDSQQPIKFWDPKTGQSLATLHAHKNTVMEVKLNLNGNWLLTASRDHLCKLFDIRNLKEELQVFRGHKKEATAVAWHPVHEGLFASGGSDGSLLFWHVGVEKEVGGMEMAHEGMIWSLAWHPLGHILCSGSNDHTSKFWTRNRPGDKMRDRYNLNLLPGMSEDGVEYDDLEPNSLAVIPGMGIPEQLKLAMEQEQMGKDESNEIEMTIPGLDWGMEEVMQKDQKKVPQKKVPYAKPIPAQFQQAWMQNKVPIPAPNEVLNDRKEDIKLEEKKKTQAEIEQEMATLQYTNPQLLEQLKIERLAQKQVEQIQPPPSSGTPLLGPQPFPGQGPMSQIPQGFQQPHPSQQMPMNMAQMGPPGPQGQFRPPGPQGQMGPQGPPLHQGGGGPQGFMGPQGPQGPPQGLPRPQDMHGPQGMQRHPGPHGPLGPQGPPGPQGSSGPQGHMGPQGPPGPQGHIGPQGPPGPQGHLGPQGPPGTQGMQGPPGPRGMQGPPHPHGIQGGPGSQGIQGPVSQGPLMGLNPRGMQGPPGPRENQGPAPQGMIMGHPPQEMRGPHPPGGLLGHGPQEMRGPQEIRGMQGPPPQGSMLGPPQELRGPPGSQSQQGPPQGSLGPPPQGGMQGPPGPQGQQNPARGPHPSQGPIPFQQQKTPLLGDGPRAPFNQEGQSTGPPPLIPGLGQQGAQGRIPPLNPGQGPGPNKGDSRGPPNHHMGPMSERRHEQSGGPEHGPERGPFRGGQDCRGPPDRRGPHPDFPDDFSRPDDFHPDKRFGHRLREFEGRGGPLPQEEKWRRGGPGPPFPPDHREFSEGDGRGAARGPPGAWEGRRPGDERFPRDPEDPRFRGRREESFRRGAPPRHEGRAPPRGRDGFPGPEDFGPEENFDASEEAARGRDLRGRGRGTPRGGRKGLLPTPDEFPRFEGGRKPDSWDGNREPGPGHEHFRDTPRPDHPPHDGHSPASRERSSSLQGMDMASLPPRKRPWHDGPGTSEHREMEAPGGPSEDRGGKGRGGPGPAQRVPKSGRSSSLDGEHHDGYHRDEPFGGPPGSGTPSRGGRSGSNWGRGSNMNSGPPRRGASRGGGRGR

SEQ ID NO: 357 - protein, 121 aa, Homo sapiens
MGRIFLDHIGGTRLFSCANCDTILTNRSELISTRFTGATGRAFLFNKVVNLQYSEVQDRVMLTGRHMVRDVSCKNCNSKLGWIYEFATEDSQRYKEGRVILERALVRESEGFEEHVPSDNS

SEQ ID NO: 358 - protein, 803 aa, Homo sapiens
MDFPQHSQHVLEQLNQQRQLGLLCDCTFVVDGVHFKAHKAVLAACSEYFKMLFVDQKDVVHLDISNAAGLGQVLEFMYTAKLSLSPENVDDVLAVATFLQMQDIITACHALKSLAEPATSPGGNAEALATEGGDKRAKEEKVATSTLSRLEQAGRSTPIGPSRDLKEERGGQAQSAASGAEQTEKADAPREPPPVELKPDPTSGMAAAEAEAALSESSEQEMEVEPARKGEEEQKEQEEQEEEGAGPAEVKEEGSQLENGEAPEENENEESAGTDSGQELGSEARGLRSGTYGDRTESKAYGSVIHKCEDCGKEFTHTGNFKRHIRIHTGEKPFSCRECSKAFSDPAACKAHEKTHSPLKPYGCEECGKSYRLISLLNLHKKRHSGEARYRCEDCGKLFTTSGNLKRHQLVHSGEKPYQCDYCGRSFSDPTSKMRHLETHDTDKEHKCPHCDKKFNQVGNLKAHLKIHIADGPLKCRECGKQFTTSGNLKRHLRIHSGEKPYVCIHCQRQFADPGALQRHVRIHTGEKPCQCVMCGKAFTQASSLIAHVRQHTGEKPYVCERCGKRFVQSSQLANHIRHHDNIRPHKCSVCSKAFVNVGDLSKHIIIHTGEKPYLCDKCGRGFNRVDNLRSHVKTVHQGKAGIKILEPEEGSEVSVVTVDDMVTLATEALAATAVTQLTVVPVGAAVTADETEVLKAEISKAVKQVQEEDPNTHILYACDSCGDKFLDANSLAQHVRIHTAQALVMFQTDADFYQQYGPGGTWPAGQVLQAGELVFRPRDGAEGQPALAETSPTAPECPPPAE
